(19) United States
(12) Patent Application Publication
(10) Pub. No.: US 2022/0387622 A1
(43) Pub. Date: Dec. 8, 2022

(54) METHODS OF EDITING A SINGLE NUCLEOTIDE POLYMORPHISM USING PROGRAMMABLE BASE EDITOR SYSTEMS

(71) Applicant: Beam Therapeutics Inc., Cambridge, MA (US)

(72) Inventors: Jason Michael GEHRKE, Cambridge, MA (US); Natalie PETROSSIAN, Cambridge, MA (US)

(73) Assignee: Beam Therapeutics Inc., Cambridge, MA (US)

(21) Appl. No.: 17/612,879

(22) PCT Filed: May 20, 2020
(86) PCT No.: PCT/US2020/033807

§ 371 Date: Nov. 19, 2021

Related U.S. Application Data
(60) Provisional application No. 62/850,919, filed on May 21, 2019.

(51) Int. Cl. A61K 48/00; C12N 9/22; C12N 15/11; C12N 9/78

(52) U.S. Cl. CPC A61K 48/005; C12N 9/22; C12N 15/11; C12N 9/78

(57) ABSTRACT

Described are compositions and methods for altering mutations associated with Rett Syndrome (RETT). Provided herein are compositions and methods of using base editors (e.g., ABE8) comprising a polynucleotide programmable nucleotide binding domain and a nucleobase editing domain in conjunction with a guide polynucleotide. Also provided herein are base editor systems for editing nucleobases of target nucleotide sequences.

### CROSS REFERENCE TO RELATED APPLICATION

[0001] This International PCT application claims priority to and benefit of Provisional Patent Application No. 62/850,919, filed on May 21, 2019, the entire contents of which are incorporated by reference herein in their entirety.

### BACKGROUND OF THE DISCLOSURE

[0002] Rett Syndrome (RTT or RETT) is caused by a heterogeneous group of mutations in the methyl-CpG-binding protein 2 (Mecp2) gene that impair or abrogate the encoded protein's ability to modify chromatin and transcriptional states in the central nervous system (CNS). Gene therapy to deliver functional Mecp2 or using RNA editing to repair the endogenous Mecp2 (MECP2) mRNA transcripts are promising approaches to therapeutic interventions when delivered broadly throughout the CNS. However, both approaches must overcome significant challenges to achieve therapeutic efficacy. Mecp2 gene therapy must tightly control the dosage of the delivered gene on a per-cell basis or risk mimicking the phenotype of Mecp2 duplication syndrome. RNA editing platforms are unable to precisely correct the most prevalent Mecp2 mutations accounting for more than 45% of RTT diagnoses and also induce efficient, unguided off-target editing.

[0003] The genetic mutations in Mecp2 that cause Rett Syndrome (RTT) are highly heterogeneous. As a consequence, the favored strategy for therapy has been to deliver wild-type Mecp2 carried by recombinant adeno-associated virus (rAAV). Because this strategy is agnostic to the causal mutation in each individual, a successful gene therapy approach would provide a therapeutic option to a large portion of the RTT patient population. To date, however, this strategy has been met with limited success. RTT patients are nearly always heterozygotic females, resulting in characteristic wild-type and mutant X-linked MeCP2 mosaic expression within the central nervous system (CNS) due to random X-chromosome inactivation. Thus, rAAV delivery and expression of wild-type MeCP2 in neurons already expressing wild-type MeCP2 is likely to partially mimic the phenotype of MeCP2 duplication syndrome. Consistent with this, high transduction efficiency in the CNS of RTT-model mice resulted in approximately 2-fold greater MeCP2 expression than found in wild-type mice.

[0004] Therefore, there is a need for novel compositions and methods for treating patients with Rett Syndrome.

### INCORPORATION BY REFERENCE

[0005] All publications, patents, and patent applications mentioned in this specification are herein incorporated by reference to the same extent as if each individual publication, patent, or patent application was specifically and individually indicated to be incorporated by reference. Absent any indication otherwise, publications, patents, and patent applications mentioned in this specification are incorporated herein by reference in their entireties.

### SUMMARY OF THE DISCLOSURE

[0006] As described below, the present invention features compositions and methods for the precise correction of pathogenic amino acids using a programmable nucleobase editor. In particular, the compositions and methods of the invention are useful for the treatment of Rett Syndrome (RTT or RETT). Thus, the invention provides compositions and methods for treating Rett Syndrome using an adenosine (A) base editor (ABE) (e.g., ABE8) to precisely correct a single nucleotide polymorphism in the endogenous Mecp2 gene to correct a deleterious mutation (e.g., R106W, R133C, T158M, R255*, R270*, R306C).

[0007] In an aspect, a method of editing a methyl CpG binding protein 2 (MECP2) gene or regulatory element thereof in a subject is provided, in which the method comprising administering to a subject in need thereof (i) an adenosine base editor or a nucleic acid sequence encoding the adenosine base editor and (ii) a guide polynucleotide or a nucleic acid sequence encoding the guide polynucleotide, wherein the adenosine base editor comprises a programmable DNA binding domain and an adenosine deaminase domain, wherein the adenosine deaminase domain comprises an amino acid substitution at amino acid position 82 or 166 relative to a TadA reference sequence, or a corresponding position thereof, and wherein the guide polynucleotide directs the adenosine base editor to effect an A-to-G nucleobase alteration in the MECP2 gene or a regulatory element thereof, which comprises a SNP associated with Rett syndrome (RETT); wherein the A-to-G nucleobase alteration is at the SNP associated with RETT, which results in an R133C or an R306C amino acid mutation in a MECP2 polypeptide, or a variant thereof, encoded by the MECP2 gene. In an embodiment, the TadA reference sequence comprises amino acid sequence MSEVEFSHEYWMRHALTLAKRARDEREVPVGAVLVLNNRVIGEGWNRAIGLHDPTAH AEIMALRQGGLVMQNYRLIDATLYVTFEPCVMCAGAMIHSRIGRVVFGVRNAKTGAAG SLMDVLHYPGMNHRVEITEGILADECAALLCYFFRMPRQVFNAQKKAQSSTD. In an embodiment, the A-to-G nucleobase alteration changes the SNP associated with RETT to a wild type nucleobase. In an embodiment, the A-to-G nucleobase alteration changes the SNP associated with RETT to a non-wild type nucleobase that results in one or more ameliorated symptoms of RETT. In an embodiment, the A-to-G nucleobase alteration at the SNP associated with RETT changes a cysteine to an arginine or stop codon to arginine in the methyl CpG binding protein 2 (MECP2) polypeptide. In an embodiment, the SNP associated with RETT results in expression of an MECP2 polypeptide comprising an arginine at amino acid position 133 and/or 306. In an embodiment, the guide polynucleotide comprises a nucleic acid sequence complementary to the MECP2 gene or regulatory element thereof comprising the SNP associated with RETT. In an embodiment, the adenosine base editor is in complex with a single guide RNA (sgRNA) comprising a nucleic acid sequence complementary to the MECP2 gene or regulatory element thereof comprising the SNP associated with RETT. In an embodiment, the guide polynucleotide comprises a nucleic acid sequence selected from 5′-AGAGCAAAAGGCUUUUCCCU-3′, 5′-UAGAGCAAAAGGCUUUUCCC-3′, 5′-UAGAGCAAAAGGCUUUUCCCU-3′, 5′-UUUAGAGCAAAAGGCUUUUCCCU-3′, 5′-UCUUGCACUUCUUGAUGGGG-3′, 5′-CUUGCACUUCUUGAUGGGGAG-3′, or 5′-GUCUUGCACUUCUUGAUGGGGAG-3′.

[0008] In an aspect, a base editor system is provided, in which the base editor system comprises (i) an adenosine base editor or a nucleic acid sequence encoding the adenosine base editor and (ii) a guide polynucleotide or a nucleic acid sequence encoding the guide polynucleotide, wherein the adenosine base editor comprises a programmable DNA binding domain and an adenosine deaminase domain, wherein the adenosine deaminase domain comprises an amino acid substitution at amino acid position 82 or 166 relative to a TadA reference sequence or a corresponding position thereof, and wherein the guide polynucleotide directs the adenosine base editor to effect an A-to-G nucleobase alteration in a methyl CpG binding protein 2 (MECP2) gene or regulatory element thereof, which comprises a SNP associated with Rett syndrome (RETT); wherein the A-to-G nucleobase alteration is at the SNP associated with RETT, which results in an R133C or an R306C amino acid mutation in a MECP2 polypeptide, or a variant thereof, encoded by the MECP2 gene. In an embodiment, the A-to-G nucleobase alteration changes the SNP associated with RETT to a wild type nucleobase. In an embodiment, the A-to-G nucleobase alteration changes the SNP associated with RETT to a non-wild type nucleobase that results in one or more ameliorated symptoms of RETT. In an embodiment, the SNP associated with RETT results in expression of an MECP2 polypeptide comprising an arginine at amino acid position 133 and/or 306. In an embodiment, the guide polynucleotide comprises a nucleic acid sequence complementary to the MECP2 gene or regulatory element thereof comprising the SNP associated with RETT. In an embodiment, the adenosine base editor is in complex with a single guide RNA (sgRNA) comprising a nucleic acid sequence complementary to the MECP2 gene or regulatory element thereof comprising the SNP associated with RETT. In an embodiment, the guide polynucleotide comprises a nucleic acid sequence selected from 5′-AGAGCAAAAGGCUUUUCCCU-3′, 5′-UAGAGCAAAAGGCUUUUCCC-3′, 5′-UAGAGCAAAAGGCUUUUCCCU-3′, 5′-UUUAGAGCAAAAGGCUUUUCCCU-3′, 5′-UCUUGCACUUCUUGAUGGGG-3′, 5′-CUUGCACUUCUUGAUGGGGAG-3′, or 5′-GUCUUGCACUUCUUGAUGGGGAG-3′.

[0009] In another aspect, a method of editing an MECP2 polynucleotide comprising a single nucleotide polymorphism (SNP) associated with Rett Syndrome (RETT) is provided, in which the method comprises contacting the MECP2 polynucleotide with an Adenosine Deaminase Base Editor 8 (ABE8) in a complex with one or more guide polynucleotides, wherein the ABE8 comprises a polynucleotide programmable DNA binding domain and an adenosine deaminase domain, and wherein one or more of said guide polynucleotides target said base editor to effect an A⋅T to G⋅C alteration of the SNP in the MECP2 polynucleotide associated with RETT, wherein the alteration is one or both of R133C or R306C. In an embodiment, the contacting is in a cell, a eukaryotic cell, a mammalian cell, or human cell. In an embodiment, the cell is in vivo or ex vivo. In an embodiment, the A⋅T to G⋅C alteration at the SNP associated with RETT changes a cysteine to an arginine, or stop codon to arginine in the methyl CpG binding protein 2 (Mecp2) polypeptide. In an embodiment, the SNP associated with RETT results in expression of an MECP2 polypeptide comprising an arginine at amino acid position 133 and/or 306. In an embodiment, the polynucleotide programmable DNA binding domain is a Cas9 selected from Streptococcus pyogenes Cas9 (SpCas9), Staphylococcus aureus Cas9 (SaCas9), Streptococcus thermophilus 1 Cas9 (St1Cas9), Steptococcus canis Cas9(ScCas9), or variant thereof. In an embodiment, the polynucleotide programmable DNA binding domain comprises a modified SpCas9 that binds to an altered protospacer-adjacent motif (PAM). In an embodiment, the modified SpCas9 binds to a PAM comprising a nucleic acid sequence selected from 5′-NGT-3′ or 5′-NGG-3′. In an embodiment, the modified SpCas9 binds to a NGT PAM variant. In an embodiment, the NGT PAM variant comprises amino acid substitutions at one or more residues 1335, 1337, 1135, 1136, 1218, and/or 1219 of the modified SpCas9, or corresponding amino acid substitutions thereof. In an embodiment, the modified SpCas9 comprises the amino acid substitutions L1111R, D1135V, G1218R, E1219F, A1322R, R1335V, T1337R and one or more of L1111, D1135L, S1136R, G1218S, E1219V, D1332A, D1332S, D1332T, D1332V, D1332L, D1332K, D1332R, R1335Q, T1337, T1337L, T1337Q, T1337I, T1337V, T1337F, T1337S, T1337N, T1337K, T1337H, T1337Q, and T1337M, or corresponding amino acid substitutions thereof. In an embodiment, the modified SpCas9 comprises the amino acid substitutions D1135L, S1136R, G1218S, E1219V, A1322R, R1335Q, and T1337, and one or more of L1111R, G1218R, E1219F, D1332A, D1332S, D1332T, D1332V, D1332L, D1332K, D1332R, T1337L, T1337I, T1337V, T1337F, T1337S, T1337N, T1337K, T1337R, T1337H, T1337Q, and T1337M, or corresponding amino acid substitutions thereof. In an embodiment, the polynucleotide programmable DNA binding domain is a nuclease inactive or nickase variant. In an embodiment, the nickase variant comprises an amino acid substitution D10A or a corresponding amino acid substitution thereof. In an embodiment, the adenosine deaminase domain is capable of deaminating adenosine in deoxyribonucleic acid (DNA). In an embodiment, the adenosine deaminase domain comprises an alteration at amino acid position 82 and/or 166 of MSEVEFSHEYWMRHALTLAKRARDEREVPVGAVLVLNNRVIGEGWNRAIGLHDPTAH AEIMALRQGGLVMQNYRLIDATLYVTFEPCVMCAGAMIHSRIGRVVFGVRNAKTGAAG SLMDVLHYPGMNHRVEITEGILADECAALLCYFFRMPRQVFNAQKKAQSSTD. In an embodiment, the adenosine deaminase domain comprises alterations at amino acid position 82 and 166. In an embodiment, the adenosine deaminase domain comprises an alteration selected from a V82S alteration, a T166R alteration, or both a V82S and an T166R alteration. In an embodiment, the adenosine deaminase domain further comprises one or more of the following alterations: Y147T, Y147R, Q154S, Y123H, and Q154R. In an embodiment, the adenosine deaminase domain comprises an alteration selected from the group consisting of: Y147T+Q154R; Y147T+Q154S; Y147R+Q154S; V82S+Q154S; V82S+Y147R; V82S+Q154R; V82S+Y123H; I76Y+V82S; V82S+Y123H+Y147T; V82S+Y123H+Y147R; V82S+Y123H+Q154R; Y147R+Q154R+Y123H; Y147R+Q154R+I76Y; Y147R+Q154R+T166R; Y123H+Y147R+Q154R+I76Y; V82S+Y123H+Y147R+Q154R; and I76Y+V82S+Y123H+Y147R+Q154R. In an embodiment, the ABE8 comprises an adenosine deaminase variant monomer, wherein the adenosine deaminase monomer comprises V82S and T166R alterations. In an embodiment, the ABE8 comprises an adenosine deaminase heterodimer comprising a wild-type adenosine deaminase domain and an adenosine deaminase variant. In an embodiment, the adenosine deaminase variant monomer further comprises one or more alterations selected from the group consisting of Y147T, Y147R, Q154S, Y123H, V82S, T166R, and Q154R. In an embodiment, the ABE8 comprises an adenosine deaminase heterodimer comprising a TadA*8 domain and wild-type TadA domain. In an embodiment, the adenosine deaminase monomer further comprises an alteration selected from the group consisting of Y147T, Y147R, Q154S, Y123H, V82S, T166R, and Q154R. In an embodiment, the ABE8 base editor comprises a heterodimer comprising a wild-type TadA domain and an adenosine deaminase variant comprising a combination of alterations selected from the group consisting of Y147T+Q154R; Y147T+Q154S; Y147R+Q154S; V82S+Q154S; V82S+Y147R; V82S+Q154R; V82S+Y123H; I76Y+V82S; V82S+Y123H+Y147T; V82S+Y123H+Y147R; V82S+Y123H+Q154R; Y147R+Q154R+Y123H; Y147R+Q154R+I76Y; Y147R+Q154R+T166R; Y123H+Y147R+Q154R+I76Y; V82S+Y123H+Y147R+Q154R; and I76Y+V82S+Y123H+Y147R+Q154R. In an embodiment, the guide polynucleotide comprises a nucleic acid sequence selected from AGAGCAAAAGGCUUUUCCCU-3′, 5′-UAGAGCAAAAGGCUUUUCCC-3′, 5′-UAGAGCAAAAGGCUUUUCCCU-3′, 5′-UUUAGAGCAAAAGGCUUUUCCCU-3′, 5′-UCUUGCACUUCUUGAUGGGG-3′, 5′-CUUGCACUUCUUGAUGGGGAG-3′, or 5′-GUCUUGCACUUCUUGAUGGGGAG-3′. In an embodiment, the adenosine deaminase is a TadA deaminase. In an embodiment, the TadA deaminase is a TadA*8 variant. In an embodiment, the TadA*8 variant is selected from the group consisting of: TadA*8.1, TadA*8.2, TadA*8.3, TadA*8.4, TadA*8.5, TadA*8.6, TadA*8.6, TadA*8.7, TadA*8.8, TadA*8.9, TadA*8.10, TadA*8.11, TadA*8.12, TadA*8.13, TadA*8.14, TadA*8.15, TadA*8.16, TadA*8.17, TadA*8.18, TadA*8.19, TadA*8.20, TadA*8.21, TadA*8.22, TadA*8.23, and TadA*8.24. In an embodiment, the ABE8 base editor is selected from the group consisting of: ABE8.1-m, ABE8.2-m, ABE8.3-m, ABE8.4-m, ABE8.5-m, ABE8.6-m, ABE8.7-m, ABE8.8-m, ABE8.9-m, ABE8.10-m, ABE8.11-m, ABE8.12-m, ABE8.13-m, ABE8.14-m, ABE8.15-m, ABE8.16-m, ABE8.17-m, ABE8.18-m, ABE8.19-m, ABE8.20-m, ABE8.21-m, ABE8.22-m, ABE8.23-m, ABE8.24-m, ABE8.1-d, ABE8.2-d, ABE8.3-d, ABE8.4-d, ABE8.5-d, ABE8.6-d, ABE8.7-d, ABE8.8-d, ABE8.9-d, ABE8.10-d, ABE8.11-d, ABE8.12-d, ABE8.13-d, ABE8.14-d, ABE8.15-d, ABE8.16-d, ABE8.17-d, ABE8.18-d, ABE8.19-d, ABE8.20-d, ABE8.21-d, ABE8.22-d, ABE8.23-d, and ABE8.24. In an embodiment, the one or more guide RNAs comprises a CRISPR RNA (crRNA) and a trans-encoded small RNA (tracrRNA), wherein the crRNA comprises a nucleic acid sequence complementary to a MECP2 nucleic acid sequence comprising the SNP associated with RETT. In an embodiment, the ABE8 base editor is in complex with a single guide RNA (sgRNA) comprising a nucleic acid sequence complementary to an MECP2 nucleic acid sequence comprising the SNP associated with RETT. In an embodiment, the ABE8 base editor comprises or consists essentially of the following sequence or a fragment thereof having adenosine deaminase activity:

MSEVEFSHEYWMRHALTLAKRARDEREVPVGAVLVLNNRVIGEGWNRAIG
LHDPTAHAEIMALRQGGLVMQNYRLIDATLYVTFEPCVMCAGAMIHSRIG
RVVFGVRNAKTGAAGSLMDVLHYPGMNHRVEITEGILADEGAALLCTFFR
MPRQVFNAQKKAQSSTD.

[0010] In another aspect is provided a cell produced by introducing into the cell, or a progenitor thereof: (i) an ABE8 base editor, or a polynucleotide encoding said base editor, wherein said ABE8 base editor comprises a polynucleotide programmable DNA binding domain and an adenosine deaminase domain; and (ii) one or more guide polynucleotides that target the base editor to effect an A⋅T to G⋅C alteration of the SNP in an MECP2 polynucleotide associated with RETT syndrome (RETT), wherein the alteration is one or both of R133C or R306C. In an embodiment, the cell is a neuron. In an embodiment, the neuron expresses an MECP2 polypeptide. In an embodiment, the cell is from a subject having RETT. In an embodiment, the cell is a mammalian cell or a human cell. In an embodiment, the A⋅T to G⋅C alteration at the SNP associated with RETT changes a cysteine to an arginine, stop codon to arginine in the methyl CpG binding protein 2 (MECP2) polypeptide. In an embodiment, the SNP associated with RETT results in expression of an MECP2 polypeptide comprising an arginine at amino acid position 133 and/or 306. In an embodiment, the polynucleotide programmable DNA binding domain is a Cas9 selected from Streptococcus pyogenes Cas9 (SpCas9), Staphylococcus aureus Cas9 (SaCas9), Streptococcus thermophilus 1 Cas9 (St1Cas9), Steptococcus canis Cas9(ScCas9), or variant thereof. In an embodiment, the polynucleotide programmable DNA binding domain comprises a modified SpCas9 that binds to an altered protospacer-adjacent motif (PAM). In an embodiment, the modified SpCas9 binds to a PAM comprising a nucleic acid sequence selected from 5′-NGT-3′ or 5′-NGG-3′. In an embodiment, the modified SpCas9 binds to a NGT PAM variant. In an embodiment, the NGT PAM variant comprises amino acid substitutions at one or more residues 1335, 1337, 1135, 1136, 1218, and/or 1219 of the modified SpCas9, or corresponding amino acid substitutions thereof. In an embodiment, the modified SpCas9 comprises the amino acid substitutions L1111R, D1135V, G1218R, E1219F, A1322R, R1335V, T1337R and one or more of L1111, D1135L, S1136R, G1218S, E1219V, D1332A, D1332S, D1332T, D1332V, D1332L, D1332K, D1332R, R1335Q, T1337, T1337L, T1337Q, T1337I, T1337V, T1337F, T1337S, T1337N, T1337K, T1337H, T1337Q, and T1337M, or corresponding amino acid substitutions thereof. In an embodiment, the modified SpCas9 comprises the amino acid substitutions D1135L, S1136R, G1218S, E1219V, A1322R, R1335Q, and T1337, and one or more of L1111R, G1218R, E1219F, D1332A, D1332S, D1332T, D1332V, D1332L, D1332K, D1332R, T1337L, T1337I, T1337V, T1337F, T1337S, T1337N, T1337K, T1337R, T1337H, T1337Q, and T1337M, or corresponding amino acid substitutions thereof. In an embodiment, the polynucleotide programmable DNA binding domain is a nuclease inactive or nickase variant. In an embodiment, the nickase variant comprises an amino acid substitution D10A or a corresponding amino acid substitution thereof. In an embodiment, the adenosine deaminase domain is capable of deaminating adenosine in deoxyribonucleic acid (DNA). In an embodiment, the adenosine deaminase domain comprises an alteration at amino acid position 82 and/or 166 of MSEVEFSHEYWMRHALTLAKRARDEREVPVGAVLVLNNRVIGEGWNRAIGLHDPTAHAEIMALRQ GGLVMQNYRLIDATLYVTFEPCVMCAGAMIHSRIGRVVFGVRNAKTGAAGSLMDVLHYPGMNHRV EITEGILADECAALLCYFFRMPRQVFNAQKKAQSSTD. In an embodiment, the adenosine deaminase further comprises one or more of the following alterations: Y147T, Y147R, Q154S, Y123H, and Q154R. In an embodiment, the adenosine deaminase domain comprises a combination of alterations selected from the group consisting of: Y147T+Q154R; Y147T+Q154S; Y147R+Q154S; V82S+Q154S; V82S+Y147R; V82S+Q154R; V82S+Y123H; I76Y+V82S; V82S+Y123H+Y147T; V82S+Y123H+Y147R; V82S+Y123H+Q154R; Y147R+Q154R+Y123H; Y147R+Q154R+I76Y; Y147R+Q154R+T166R; Y123H+Y147R+Q154R+I76Y; V82S+Y123H+Y147R+Q154R; and I76Y+V82S+Y123H+Y147R+Q154R. In an embodiment, the ABE8 comprises an adenosine deaminase variant monomer, wherein the adenosine deaminase monomer comprises V82S and T166R alterations. In an embodiment, the ABE8 comprises an adenosine deaminase heterodimer comprising a wild-type adenosine deaminase domain and an adenosine deaminase variant. In an embodiment, the adenosine deaminase variant monomer further comprises one or more alterations selected from the group consisting of Y147T, Y147R, Q154S, Y123H, V82S, T166R, and Q154R. In an embodiment, the ABE8 comprises an adenosine deaminase heterodimer comprising a TadA*7.10 domain and TadA*8 domain. In an embodiment, the adenosine deaminase variant monomer further comprises one or more alterations selected from the group consisting of Y147T, Y147R, Q154S, Y123H, V82S, T166R, and Q154R. In an embodiment, the ABE8 base editor comprises a heterodimer comprising a TadA*7.10 domain and an adenosine deaminase variant comprising alterations selected from the group consisting of Y147T+Q154R; Y147T+Q154S; Y147R+Q154S; V82S+Q154S; V82S+Y147R; V82S+Q154R; V82S+Y123H; I76Y+V82S; V82S+Y123H+Y147T; V82S+Y123H+Y147R; V82S+Y123H+Q154R; Y147R+Q154R+Y123H; Y147R+Q154R+I76Y; Y147R+Q154R+T166R; Y123H+Y147R+Q154R+I76Y; V82S+Y123H+Y147R+Q154R; and I76Y+V82S+Y123H+Y147R+Q154R. In an embodiment, the guide polynucleotide comprises a nucleic acid sequence selected from 5′-AGAGCAAAAGGCUUUUCCCU-3′, 5′-UAGAGCAAAAGGCUUUUCCC-3′, 5′-UAGAGCAAAAGGCUUUUCCCU-3′, 5′-UUUAGAGCAAAAGGCUUUUCCCU-3′, 5′-UCUUGCACUUCUUGAUGGGG-3′, 5′-CUUGCACUUCUUGAUGGGGAG-3′, or 5′-GUCUUGCACUUCUUGAUGGGGAG-3′. In an embodiment, the adenosine deaminase is a TadA deaminase. In an embodiment, the TadA deaminase is a TadA*8 variant. In an embodiment, the TadA*8 variant is selected from the group consisting of: TadA*8.1, TadA*8.2, TadA*8.3, TadA*8.4, TadA*8.5, TadA*8.6, TadA*8.6, TadA*8.7, TadA*8.8, TadA*8.9, TadA*8.10, TadA*8.11, TadA*8.12, TadA*8.13, TadA*8.14, TadA*8.15, TadA*8.16, TadA*8.17, TadA*8.18, TadA*8.19, TadA*8.20, TadA*8.21, TadA*8.22, TadA*8.23, and TadA*8.24. In an embodiment, the ABE8 base editor is selected from the group consisting of: ABE8.1-m, ABE8.2-m, ABE8.3-m, ABE8.4-m, ABE8.5-m, ABE8.6-m, ABE8.7-m, ABE8.8-m, ABE8.9-m, ABE8.10-m, ABE8.11-m, ABE8.12-m, ABE8.13-m, ABE8.14-m, ABE8.15-m, ABE8.16-m, ABE8.17-m, ABE8.18-m, ABE8.19-m, ABE8.20-m, ABE8.21-m, ABE8.22-m, ABE8.23-m, ABE8.24-m, ABE8.1-d, ABE8.2-d, ABE8.3-d, ABE8.4-d, ABE8.5-d, ABE8.6-d, ABE8.7-d, ABE8.8-d, ABE8.9-d, ABE8.10-d, ABE8.11-d, ABE8.12-d, ABE8.13-d, ABE8.14-d, ABE8.15-d, ABE8.16-d, ABE8.17-d, ABE8.18-d, ABE8.19-d, ABE8.20-d, ABE8.21-d, ABE8.22-d, ABE8.23-d, and ABE8.24. In an embodiment, the one or more guide RNAs comprises a CRISPR RNA (crRNA) and a trans-encoded small RNA (tracrRNA), wherein the crRNA comprises a nucleic acid sequence complementary to a MECP2 nucleic acid sequence comprising the SNP associated with RETT. In an embodiment, the base editor is in complex with a single guide RNA (sgRNA) comprising a nucleic acid sequence complementary to an MECP2 nucleic acid sequence comprising the SNP associated with RETT. In an embodiment, the ABE8 base editor comprises or consists essentially of the following sequence or a fragment thereof having adenosine deaminase activity: MSEVEFSHEYWMRHALTLAKRARDEREVPVGAVLVLNNRVIGEGWNRAIGLHDPTAHAEIMALRQ GGLVMQNYRLIDATLYVTFEPCVMCAGAMIHSRIGRVVFGVRNAKTGAAGSLMDVLHYPGMNHRV EITEGILADECAALLCTFFRMPRQVFNAQKKAQSSTD. In an embodiment, the gRNA comprises a scaffold having the following sequence:

GTTTTAGAGCTAGAAATAGCAAGTTAAAATAAGGCTAGTCCGTTATCAAC
TTGAAAAAGTGGCACCGAGTCGGTGCTTTTTTT.

[0011] In another aspect, a method of treating RETT Syndrome (RETT) in a subject is provided, in which the method comprises administering to said subject an ABE8 base editor, or a polynucleotide encoding said base editor, wherein said ABE8 base editor comprises a polynucleotide programmable DNA binding domain and an adenosine deaminase domain; and one or more guide polynucleotides that target the ABE8 base editor to effect an A⋅T to GC alteration of the SNP in an MECP2 polynucleotide associated with RETT, wherein the alteration is one or both of R133C and/or R306C. In an embodiment, the subject is a mammal or a human. In an embodiment, the method comprises delivering the ABE8 base editor, or polynucleotide encoding said ABE8 base editor, and said one or more guide polynucleotides to a cell of the subject, optionally, wherein the cell is a neuron. In an embodiment of the method, the A⋅T to G⋅C alteration at the SNP associated with RETT changes a cysteine to an arginine, or stop codon to arginine in the methyl CpG binding protein 2 (MECP2) polypeptide. In an embodiment, the SNP associated with RETT results in expression of an MECP2 polypeptide comprising an arginine at amino acid position 133 and/or 306. In an embodiment, the polynucleotide programmable DNA binding domain is a Cas9 selected from Streptococcus pyogenes Cas9 (SpCas9), Staphylococcus aureus Cas9 (SaCas9), Streptococcus thermophilus 1 Cas9 (St1Cas9), Steptococcus canis Cas9(ScCas9), or variant thereof. In an embodiment, the polynucleotide programmable DNA binding domain comprises a modified SpCas9 that binds to an altered protospacer-adjacent motif (PAM). In an embodiment, the modified SpCas9 binds to a PAM comprising a nucleic acid sequence selected from 5′-NGT-3′ or 5′-NGG-3′. In an embodiment, the modified SpCas9 binds to a NGT PAM variant. In an embodiment, the NGT PAM variant comprises amino acid substitutions at one or more residues 1335, 1337, 1135, 1136, 1218, and/or 1219, of the modified SpCas9, or corresponding amino acid substitutions thereof. In an embodiment, the modified SpCas9 comprises the amino acid substitutions L1111R, D1135V, G1218R, E1219F, A1322R, R1335V, T1337R and one or more of L1111, D1135L, 51136R, G1218S, E1219V, D1332A, R1335Q, T1337, T1337L, T1337Q, T1337I, T1337V, T1337F, and T1337M, or corresponding amino acid substitutions thereof. In an embodiment, the modified SpCas9 comprises the amino acid substitutions D1135L, 51136R, G1218S, E1219V, A1322R, R1335Q, and T1337, and one or more of L1111R, D1135L, 51136R, G1218S, E1219V, D1332A, D1332S, D1332T, D1332V, D1332L, D1332K, D1332R, R1335Q, T1337, T1337L, T1337Q, T1337I, T1337V, T1337F, T1337S, T1337N, T1337K, T1337R, T1337H, T1337Q, and T1337M, or corresponding amino acid substitutions thereof. In an embodiment, the polynucleotide programmable DNA binding domain is a nuclease inactive or nickase variant. In an embodiment, the nickase variant comprises an amino acid substitution D10A or a corresponding amino acid substitution thereof. In an embodiment, the adenosine deaminase domain is capable of deaminating adenosine in deoxyribonucleic acid (DNA). In an embodiment, the adenosine deaminase domain comprises an alteration at amino acid position 82 and/or 166 of MSEVEFSHEYWMRHALTLAKRARDEREVPVGAVLVLNNRVIGEGWNRAIGLHDPTAH AEIMALRQGGLVMQNYRLIDATLYVTFEPCVMCAGAMIHSRIGRVVFGVRNAKTGAAG SLMDVLHYPGMNHRVEITEGILADECAALLCYFFRMPRQVFNAQKKAQSSTD. In an embodiment, the adenosine deaminase domain comprises alterations at amino acid position 82 and 166. In an embodiment, the adenosine deaminase domain comprises an alteration selected from a V82S alteration, a T166R alteration, or both a V82S and an T166R alteration. In an embodiment, the adenosine deaminase domain further comprises one or more of the following alterations: Y147T, Y147R, Q154S, Y123H, and Q154R. In an embodiment, the adenosine deaminase domain comprises an alteration selected from the group consisting of: Y147T+Q154R; Y147T+Q154S; Y147R+Q154S; V82S+Q154S; V82S+Y147R; V82S+Q154R; V82S+Y123H; I76Y+V82S; V82S+Y123H+Y147T; V82S+Y123H+Y147R; V82S+Y123H+Q154R; Y147R+Q154R+Y123H; Y147R+Q154R+I76Y; Y147R+Q154R+T166R; Y123H+Y147R+Q154R+I76Y; V82S+Y123H+Y147R+Q154R; and I76Y+V82S+Y123H+Y147R+Q154R. In an embodiment, the ABE8 comprises an adenosine deaminase variant monomer, wherein the adenosine deaminase monomer comprises V82S and T166R alterations. In an embodiment, the ABE8 comprises an adenosine deaminase heterodimer comprising a wild-type adenosine deaminase domain and an adenosine deaminase variant. In an embodiment, the adenosine deaminase variant monomer further comprises one or more alterations selected from the group consisting of Y147T, Y147R, Q154S, Y123H, V82S, T166R, and Q154R. In an embodiment, the ABE8 comprises an adenosine deaminase heterodimer comprising a TadA*7.10 domain and TadA*8 domain. In an embodiment, the adenosine deaminase variant monomer further comprises one or more alterations selected from the group consisting of Y147T, Y147R, Q154S, Y123H, V82S, T166R, and Q154R. In an embodiment, the ABE8 base editor comprises a heterodimer comprising a TadA7.10 domain and an adenosine deaminase variant comprising alterations selected from the group consisting of Y147T+Q154R; Y147T+Q154S; Y147R+Q154S; V82S+Q154S; V82S+Y147R; V82S+Q154R; V82S+Y123H; I76Y+V82S; V82S+Y123H+Y147T; V82S+Y123H+Y147R; V82S+Y123H+Q154R; Y147R+Q154R+Y123H; Y147R+Q154R+I76Y; Y147R+Q154R+T166R; Y123H+Y147R+Q154R+I76Y; V82S+Y123H+Y147R+Q154R; and I76Y+V82S+Y123H+Y147R+Q154R. In an embodiment, the guide polynucleotide has a nucleic acid sequence selected from 5′-AGAGCAAAAGGCUUUUCCCU-3′, 5′-UAGAGCAAAAGGCUUUUCCC-3′, 5′-UAGAGCAAAAGGCUUUUCCCU-3′, 5′-UUUAGAGCAAAAGGCUUUUCCCU-3′, 5′-UCUUGCACUUCUUGAUGGGG-3′, 5′-CUUGCACUUCUUGAUGGGGAG-3′, or 5′-GUCUUGCACUUCUUGAUGGGGAG-3′. In an embodiment, the adenosine deaminase is a TadA deaminase. In an embodiment, the TadA deaminase is a TadA*8 variant. In an embodiment, the TadA*8 variant is selected from the group consisting of: TadA*8.1, TadA*8.2, TadA*8.3, TadA*8.4, TadA*8.5, TadA*8.6, TadA*8.6, TadA*8.7, TadA*8.8, TadA*8.9, TadA*8.10, TadA*8.11, TadA*8.12, TadA*8.13, TadA*8.14, TadA*8.15, TadA*8.16, TadA*8.17, TadA*8.18, TadA*8.19, TadA*8.20, TadA*8.21, TadA*8.22, TadA*8.23, and TadA*8.24. In an embodiment, the ABE8 base editor is selected from the group consisting of: ABE8.1-m, ABE8.2-m, ABE8.3-m, ABE8.4-m, ABE8.5-m, ABE8.6-m, ABE8.7-m, ABE8.8-m, ABE8.9-m, ABE8.10-m, ABE8.11-m, ABE8.12-m, ABE8.13-m, ABE8.14-m, ABE8.15-m, ABE8.16-m, ABE8.17-m, ABE8.18-m, ABE8.19-m, ABE8.20-m, ABE8.21-m, ABE8.22-m, ABE8.23-m, ABE8.24-m, ABE8.1-d, ABE8.2-d, ABE8.3-d, ABE8.4-d, ABE8.5-d, ABE8.6-d, ABE8.7-d, ABE8.8-d, ABE8.9-d, ABE8.10-d, ABE8.11-d, ABE8.12-d, ABE8.13-d, ABE8.14-d, ABE8.15-d, ABE8.16-d, ABE8.17-d, ABE8.18-d, ABE8.19-d, ABE8.20-d, ABE8.21-d, ABE8.22-d, ABE8.23-d, and ABE8.24. In an embodiment, the one or more guide RNAs comprises a CRISPR RNA (crRNA) and a trans-encoded small RNA (tracrRNA), wherein the crRNA comprises a nucleic acid sequence complementary to a MECP2 nucleic acid sequence comprising the SNP associated with RETT. In an embodiment, the base editor is in complex with a single guide RNA (sgRNA) comprising a nucleic acid sequence complementary to an MECP2 nucleic acid sequence comprising the SNP associated with RETT.

[0012] In another aspect, a method of treating Rett syndrome (RETT) in a subject is provided, in which the method comprises administering to a subject in need thereof (i) an adenosine base editor or a nucleic acid sequence encoding the adenosine base editor and (ii) a guide polynucleotide or a nucleic acid sequence encoding the guide polynucleotide, wherein the adenosine base editor comprises a programmable DNA binding domain and an adenosine deaminase domain, wherein the adenosine deaminase domain comprises an amino acid substitution at amino acid position 82 or 166 relative to a TadA reference sequence, or a corresponding position thereof, wherein the guide polynucleotide directs the adenosine base editor to effect an A-to-G nucleobase alteration in a methyl CpG binding protein 2 (MECP2) gene or a regulatory element thereof comprising a SNP associated with RETT in the subject, thereby treating RETT in the subject, and wherein the SNP associated with RETT results in an R133C or an R306C amino acid mutation in a MECP2 polypeptide, or a variant thereof, encoded by the MECP2 gene. In an embodiment of the method, the administration ameliorates at least one symptom associated with RETT. In an embodiment of the method, the administration results in faster amelioration of at least one symptom related to RETT compared to treatment with a base editor without the amino acid substitution in the adenosine deaminase. In an embodiment of the method, the A-to-G nucleobase alteration changes the SNP associated with RETT to a wild type nucleobase. In an embodiment, the A-to-G nucleobase alteration changes the SNP associated with Rett syndrome to a non-wild type nucleobase that results in ameliorated RETT symptoms. In an embodiment, the guide polynucleotide comprises a nucleic acid sequence complementary to the MECP2 gene or regulatory element thereof comprising the SNP associated with RETT. In an embodiment, the adenosine base editor is in complex with a single guide RNA (sgRNA) comprising a nucleic acid sequence complementary to the MECP2 gene or regulatory element thereof comprising the SNP associated with RETT. In an embodiment, the guide polynucleotide comprises a nucleic acid sequence selected from 5′-AGAGCAAAAGGCUUUUCCCU-3′, 5′-UAGAGCAAAAGGCUUUUCCC-3′, 5′-UAGAGCAAAAGGCUUUUCCCU-3′, 5′-UUUAGAGCAAAAGGCUUUUCCCU-3′, 5′-UCUUGCACUUCUUGAUGGGG-3′, 5′-CUUGCACUUCUUGAUGGGGAG-3′, or 5′-GUCUUGCACUUCUUGAUGGGGAG-3′.

[0013] In embodiments of the above-delineated aspects of methods of editing and the above-delineated aspect of the base editor system, and embodiments thereof, the guide polynucleotide comprises a nucleic acid sequence comprising at least 10 contiguous nucleotides that are complementary to the MECP2 gene or a regulatory element thereof. In an embodiment, the guide polynucleotide comprises a nucleic acid sequence comprising 15, 16, 17, 18, 19, 20, 21, 22, 23, 24, 25, 26, 27, 28, 29, 30, 31, 32, 33, 34, 35, 36, 37, 38, 39, or 40 contiguous nucleotides that are complementary to the MECP2 gene ore a regulatory element thereof.

[0014] In embodiments of the above-delineated aspects of methods of editing or treating and the above-delineated aspect of the cell, and embodiments thereof, the guide polynucleotide comprises a nucleic acid sequence comprising at least 10 contiguous nucleotides that are complementary to the MECP2 polynucleotide. In an embodiment, the guide polynucleotide comprises a nucleic acid sequence comprising 15, 16, 17, 18, 19, 20, 21, 22, 23, 24, 25, 26, 27, 28, 29, 30, 31, 32, 33, 34, 35, 36, 37, 38, 39, or 40 contiguous nucleotides that are complementary to the MECP2 polynucleotide.

[0015] In embodiments of the above-delineated method of treating RETT and embodiments thereof, the SNP associated with RETT results in an R133C and/or an R306C amino acid mutation in a MECP2 polypeptide, or a variant thereof, encoded by the MECP2 gene. In an embodiment, the SNP associated with RETT results in an R133C amino acid mutation in a MECP2 polypeptide, or a variant thereof, encoded by the MECP2 gene. In an embodiment, the SNP associated with RETT results in an R306C amino acid mutation in a MECP2 polypeptide, or a variant thereof, encoded by the MECP2 gene.

[0016] In embodiments of the above-delineated base editor system and embodiments thereof, the A-to-G nucleobase alteration at the SNP associated with RETT results in an R133C amino acid mutation in a MECP2 polypeptide, or a variant thereof, encoded by the MECP2 gene. In an embodiment of the base editor system, the A-to-G nucleobase alteration at the SNP associated with RETT results in an R306C amino acid mutation in a MECP2 polypeptide, or a variant thereof, encoded by the MECP2 gene.

[0017] In an embodiment of the above-delineated method of editing an MECP2 polynucleotide or method of treating RETT syndrome (RETT), and embodiments thereof, the alteration of the SNP associated with RETT comprises both R133C and R306C. In an embodiment, the alteration of the SNP associated with RETT is R133C. In an embodiment, the alteration of the SNP associated with RETT is R306C.

[0018] In an embodiment of the above-delineated cell and embodiments thereof, the alteration of the SNP associated with RETT syndrome (RETT) is R133C. In an embodiment, the alteration of the SNP associated with RETT syndrome (RETT) is R306C.

[0019] In another aspect, a guide polynucleotide or guide RNA is provided, in which the guide polynucleotide or guide RNA (gRNA) comprises 15, 16, 17, 18, 19, 20, 21, 22, 23, 24, 25, 26, 27, 28, 29, or 30 contiguous nucleotides that are perfectly complementary to an MECP2 gene that encodes an MECP2 protein. In an embodiment, the guide polynucleotide or guide RNA comprises a nucleic acid sequence selected from 5′-AGAGCAAAAGGCUUUUCCCU-3′, 5′-UAGAGCAAAAGGCUUUUCCC-3′, 5′-UAGAGCAAAAGGCUUUUCCCU-3′, 5′-UUUAGAGCAAAAGGCUUUUCCCU-3′, 5′-UCUUGCACUUCUUGAUGGGG-3′, 5′-CUUGCACUUCUUGAUGGGGAG-3′, or 5′-GUCUUGCACUUCUUGAUGGGGAG-3′. In an embodiment, the guide polynucleotide or guide RNA further comprises a scaffold sequence, wherein the scaffold sequence is optionally as follows:

GTTTTAGAGCTAGAAATAGCAAGTTAAAATAAGGCTAGTCCGTTATCAAC
TTGAAAAAGTGGCACCGAGTCGGTGCTTTTTTT.

[0020] In another aspect, a composition comprising an Adenosine Deaminase Base Editor 8 (ABE8) and a guide RNA is provided, wherein, in the composition, the ABE8 comprises a polynucleotide programmable DNA binding domain and an adenosine deaminase domain, and wherein the guide RNA targets the base editor to effect an A⋅T to G⋅C alteration of the SNP in an MECP2 polynucleotide associated with RETT syndrome, and wherein the alteration is one or both of R133C or R306C. In an embodiment of the composition, the A⋅T to G⋅C alteration at the SNP associated with RETT changes a cysteine to an arginine, or stop codon to arginine in the methyl CpG binding protein 2 (MECP2) polypeptide. In an embodiment, the SNP associated with RETT results in expression of an MECP2 polypeptide comprising an arginine at amino acid position 133 and/or 306. In an embodiment, the polynucleotide programmable DNA binding domain is a Cas9 selected from Streptococcus pyogenes Cas9 (SpCas9), Staphylococcus aureus Cas9 (SaCas9), Streptococcus thermophilus 1 Cas9 (St1Cas9), Steptococcus canis Cas9(ScCas9), or variant thereof. In an embodiment, the polynucleotide programmable DNA binding domain comprises a modified SpCas9 that binds to an altered protospacer-adjacent motif (PAM). In an embodiment, the polynucleotide programmable DNA binding domain is a nuclease inactive or nickase variant. In an embodiment, the nickase variant comprises an amino acid substitution D10A or a corresponding amino acid substitution thereof. In an embodiment, the adenosine deaminase domain is capable of deaminating adenosine in deoxyribonucleic acid (DNA). In an embodiment of the composition, the adenosine deaminase domain comprises an alteration at amino acid position 82 and/or 166 of MSEVEFSHEYWMRHALTLAKRARDEREVPVGAVLVLNNRVIGEGWNRAIGLHDPTAH AEIMALRQGGLVMQNYRLIDATLYVTFEPCVMCAGAMIHSRIGRVVFGVRNAKTGAAG SLMDVLHYPGMNHRVEITEGILADECAALLCYFFRMPRQVFNAQKKAQSSTD. In an embodiment, the adenosine deaminase domain comprises an alteration selected from a V82S alteration, a T166R alteration, or both a V82S and an T166R alteration. In an embodiment, the adenosine deaminase domain further comprises one or more of the following alterations: Y147T, Y147R, Q154S, Y123H, and Q154R. In an embodiment, the adenosine deaminase domain comprises an alteration selected from the group consisting of: Y147T+Q154R; Y147T+Q154S; Y147R+Q154S; V82S+Q154S; V82S+Y147R; V82S+Q154R; V82S+Y123H; I76Y+V82S; V82S+Y123H+Y147T; V82S+Y123H+Y147R; V82S+Y123H+Q154R; Y147R+Q154R+Y123H; Y147R+Q154R+I76Y; Y147R+Q154R+T166R; Y123H+Y147R+Q154R+I76Y; V82S+Y123H+Y147R+Q154R; and I76Y+V82S+Y123H+Y147R+Q154R. In an embodiment, the ABE8 comprises an adenosine deaminase variant monomer, wherein the adenosine deaminase monomer comprises V82S and T166R alterations. In an embodiment, the ABE8 comprises an adenosine deaminase heterodimer comprising a wild-type adenosine deaminase domain and an adenosine deaminase variant. In an embodiment, the adenosine deaminase variant monomer further comprises one or more alterations selected from the group consisting of Y147T, Y147R, Q154S, Y123H, V82S, T166R, and Q154R. In an embodiment, the ABE8 comprises an adenosine deaminase heterodimer comprising a TadA*8 domain and wild-type TadA domain. In an embodiment, the adenosine deaminase variant monomer further comprises one or more alterations selected from the group consisting of Y147T, Y147R, Q154S, Y123H, V82S, T166R, and Q154R. In an embodiment, the ABE8 base editor comprises a heterodimer comprising a wild-type TadA domain and an adenosine deaminase variant comprising a combination of alterations selected from the group consisting of Y147T+Q154R; Y147T+Q154S; Y147R+Q154S; V82S+Q154S; V82S+Y147R; V82S+Q154R; V82S+Y123H; I76Y+V82S; V82S+Y123H+Y147T; V82S+Y123H+Y147R; V82S+Y123H+Q154R; Y147R+Q154R+Y123H; Y147R+Q154R+I76Y; Y147R+Q154R+T166R; Y123H+Y147R+Q154R+I76Y; V82S+Y123H+Y147R+Q154R; and I76Y+V82S+Y123H+Y147R+Q154R. In an embodiment, the guide RNA comprises a nucleic acid sequence selected from AGAGCAAAAGGCUUUUCCCU-3′, 5′-UAGAGCAAAAGGCUUUUCCC-3′, 5′-UAGAGCAAAAGGCUUUUCCCU-3′, 5′-UUUAGAGCAAAAGGCUUUUCCCU-3′, 5′-UCUUGCACUUCUUGAUGGGG-3′, 5′-CUUGCACUUCUUGAUGGGGAG-3′, or 5′-GUCUUGCACUUCUUGAUGGGGAG-3′. In an embodiment, the adenosine deaminase is a TadA deaminase. In an embodiment, the TadA deaminase is a TadA*8 variant. In an embodiment, the TadA*8 variant is selected from the group consisting of: TadA*8.1, TadA*8.2, TadA*8.3, TadA*8.4, TadA*8.5, TadA*8.6, TadA*8.6, TadA*8.7, TadA*8.8, TadA*8.9, TadA*8.10, TadA*8.11, TadA*8.12, TadA*8.13, TadA*8.14, TadA*8.15, TadA*8.16, TadA*8.17, TadA*8.18, TadA*8.19, TadA*8.20, TadA*8.21, TadA*8.22, TadA*8.23, and TadA*8.24. In an embodiment, the ABE8 base editor is selected from the group consisting of: ABE8.1-m, ABE8.2-m, ABE8.3-m, ABE8.4-m, ABE8.5-m, ABE8.6-m, ABE8.7-m, ABE8.8-m, ABE8.9-m, ABE8.10-m, ABE8.11-m, ABE8.12-m, ABE8.13-m, ABE8.14-m, ABE8.15-m, ABE8.16-m, ABE8.17-m, ABE8.18-m, ABE8.19-m, ABE8.20-m, ABE8.21-m, ABE8.22-m, ABE8.23-m, ABE8.24-m, ABE8.1-d, ABE8.2-d, ABE8.3-d, ABE8.4-d, ABE8.5-d, ABE8.6-d, ABE8.7-d, ABE8.8-d, ABE8.9-d, ABE8.10-d, ABE8.11-d, ABE8.12-d, ABE8.13-d, ABE8.14-d, ABE8.15-d, ABE8.16-d, ABE8.17-d, ABE8.18-d, ABE8.19-d, ABE8.20-d, ABE8.21-d, ABE8.22-d, ABE8.23-d, and ABE8.24. In an embodiment of the composition, the guide RNA comprises a CRISPR RNA (crRNA) and a trans-encoded small RNA (tracrRNA), wherein the crRNA comprises a nucleic acid sequence complementary to a MECP2 nucleic acid sequence comprising the SNP associated with RETT. In an embodiment, the ABE8 base editor is in complex with a single guide RNA (sgRNA) comprising a nucleic acid sequence complementary to an MECP2 nucleic acid sequence comprising the SNP associated with RETT. In an embodiment, the ABE8 base editor comprises or consists essentially of the following sequence or a fragment thereof having adenosine deaminase activity: MSEVEFSHEYWMRHALTLAKRARDEREVPVGAVLVLNNRVIGEGWNRAIGLHDPTAH AEIMALRQGGLVMQNYRLIDATLYVTFEPCVMCAGAMIHSRIGRVVEGVRNAKTGAAG SLMDVLHYPGMNHRVEITEGILADECAALLCTFFRMPRQVFNAQKKAQSSTD. In an embodiment, the composition further comprises a lipid, optionally wherein the lipid is a cationic lipid.

[0021] In an embodiment of the above-delineated aspects of the composition and its embodiments, the composition is a pharmaceutical composition comprising a pharmaceutically acceptable excipient or diluent. In an embodiment, the pharmaceutical composition is for the treatment of RETT syndrome. In an embodiment of the pharmaceutical composition, the gRNA and the ABE8 base editor are formulated together or separately. In an embodiment, the pharmaceutical composition further comprises a vector suitable for expression in a mammalian cell, wherein the vector comprises a polynucleotide encoding the ABE8 base editor. In an embodiment of the pharmaceutical composition, the vector is a viral vector. In an embodiment of the pharmaceutical composition, the viral vector is a retroviral vector, adenoviral vector, lentiviral vector, herpesvirus vector, or adeno-associated viral vector (AAV). In an embodiment, the pharmaceutical composition further comprises a ribonucleoparticle suitable for expression in a mammalian cell.

[0022] In another aspect, a method of treating RETT syndrome is provided in which the method comprises administering to a subject in need thereof the pharmaceutical composition as described in any of the above-delineated aspects and embodiments. In an embodiment of the method, the subject is a mammal or a human.

[0023] In another aspect, the use of the pharmaceutical composition as described in any of the above-delineated aspects and embodiments in the treatment of RETT syndrome in a subject is provided. In an embodiment of the use, the subject is a mammal or a human.

[0024] In an aspect, a composition comprising the cell as described in any of above-delineated aspects and embodiments is provided. In an embodiment the composition further comprises a pharmaceutically acceptable carrier or diluent.

[0025] In another aspect, a pharmaceutical composition comprising (i) a nucleic acid encoding an ABE8 base editor; and (ii) the guide polynucleotide or guide RNA as described in the above-delineated aspect and embodiments is provided. In an embodiment, the pharmaceutical composition further comprises a lipid. In an embodiment, the lipid is a cationic lipid. In an embodiment of the pharmaceutical composition, the nucleic acid encoding the base editor is an mRNA.

[0026] In another aspect, an ABE8 base editor is provided, in which the ABE8 base editor comprises (i) a modified SpCas9 comprising the amino acid substitutions L1111R, D1135V, G1218R, E1219F, A1322R, R1335V, T1337R and one or more of L1111, D1135L, S1136R, G1218S, E1219V, D1332A, D1332S, D1332T, D1332V, D1332L, D1332K, D1332R, R1335Q, T1337, T1337L, T1337Q, T1337I, T1337V, T1337F, T1337S, T1337N, T1337K, T1337H, T1337Q, and T1337M, or corresponding amino acid substitutions thereof; and (ii) a TadA*8 adenosine deaminase.

[0027] In another aspect, an ABE8 base editor is provided, in which the ABE8 base editor comprises (i) a modified SpCas9 comprising the amino acid substitutions D1135L, S1136R, G1218S, E1219V, A1322R, R1335Q, and T1337, and one or more of L1111R, G1218R, E1219F, D1332A, D1332S, D1332T, D1332V, D1332L, D1332K, D1332R, T1337L, T1337I, T1337V, T1337F, T1337S, T1337N, T1337K, T1337R, T1337H, T1337Q, and T1337M, or corresponding amino acid substitutions thereof; and (ii) a TadA*8 deaminase.

### BRIEF DESCRIPTION OF THE DRAWINGS

[0028] The features of the present disclosure are set forth with particularity in the appended claims. A better understanding of the features and advantages of the present will be obtained by reference to the following detailed description that sets forth illustrative embodiments, in which the principles of the disclosure are utilized, and the accompanying drawings of which:

[0029] FIG. 1 is a graph depicting motor behavioral assessment based on RTT mutations.

[0030] FIG. 2 illustrates the functions of each domain of the MECP2 protein and the location of common RTT mutations.

[0031] FIG. 3 is a graph depicting the percentage of precise correction of R106W RTT mutation using ABE8 base editor variants using gRNA1, gRNA2, and gRNA5. The results for each base editor paired with each gRNA are shown from left to right ABE8.14 (farthest left) to Neg. Ct (farthest right).

### DETAILED DESCRIPTION OF THE DISCLOSURE

[0032] The present invention features compositions and methods for the precise correction of pathogenic amino acids associated with RTT using a programmable nucleobase editor (e.g., ABE8).

[0033] The invention is based, at least in part, on the discovery that a base editor featuring adenosine deaminase variants (termed Adenosine Base Editor 8 or “ABE8” herein) precisely corrects single nucleotide polymorphisms (SNPs) in the endogenous Mecp2 gene (e.g., R106W, R133C, T158M, R255*, R270*, R306C). In an embodiment, the SNP in the Mecp2 gene is R133C. In an embodiment, the SNP in the Mecp2 gene is R306C.

[0034] Described herein are compositions and methods providing base editing and base editing systems to precisely correct one or more mutations in the methyl-CpG-binding protein 2 (Mecp2) gene, which is causally related to the progressive neurodevelopmental disorder Rett Syndrome (RTT or RETT) and its symptoms. RTT is an X-linked dominant disorder that predominantly affects females, is associated in 96% of affected individuals with mutations in the Mecp2 gene and is characterized by apparently normal early development followed by a regression with loss of fine motor skills and effective communication, stereotypic movements, and apraxia or complete absence of gait (see FIG. 1). Additional clinical features of afflicted individuals include abnormal postnatal deceleration in the rate of head growth, periodic breathing, gastrointestinal dysfunction, epilepsy, and scoliosis.

[0035] The most prevalent RTT-causing mutations are cytidine to thymidine (C→T) transition mutations, resulting in a C⋅G to T⋅A base pair substitution. This substitution may be reverted back to a wild-type, non-pathogenic genomic sequence with an adenosine base editor (ABE) which catalyzes A⋅T to G⋅C substitutions. By extension, highly prevalent RTT-causing mutations are potential targets for reversion to wild-type sequence using ABEs without the risks of inducing Mecp2 gene overexpression, as may occur using gene therapy. Accordingly, A⋅T to G⋅C DNA base editing has the potential to precisely correct one or more of the most prevalent RTT-causing mutations in the Mecp2 gene.

[0036] The following description and examples illustrate embodiments of the present disclosure in detail. It is to be understood that this disclosure is not limited to the particular embodiments described herein and as such can vary. Those of skill in the art will recognize that there are numerous variations and modifications of this disclosure, which are encompassed within its scope.

[0037] The section headings used herein are for organizational purposes only and are not to be construed as limiting the subject matter described.

[0038] Although various features of the present disclosure can be described in the context of a single embodiment, the features can also be provided separately or in any suitable combination. Conversely, although the present disclosure can be described herein in the context of separate embodiments for clarity, the present disclosure can also be implemented in a single embodiment.

### Definitions

[0039] The following definitions supplement those in the art and are directed to the current application and are not to be imputed to any related or unrelated case, e.g., to any commonly owned patent or application. Although any methods and materials similar or equivalent to those described herein can be used in the practice for testing of the present disclosure, the preferred materials and methods are described herein. Accordingly, the terminology used herein is for the purpose of describing particular embodiments only, and is not intended to be limiting.

[0040] Unless defined otherwise, all technical and scientific terms as used in the present disclosure and the embodiments thereof have the meaning commonly understood by a person skilled in the pertinent art. The following references provide one of skill with a general definition of many of the terms used in this disclosure: Singleton et al., Dictionary of Microbiology and Molecular Biology (2nd ed. 1994); The Cambridge Dictionary of Science and Technology (Walker ed., 1988); The Glossary of Genetics, 5th Ed., R. Rieger et al. (eds.), Springer Verlag (1991); and Hale & Marham, The Harper Collins Dictionary of Biology (1991).

[0041] In this application, the use of the singular includes the plural unless specifically stated otherwise. It must be noted that, as used in the specification, the singular forms “a,” “an,” and “the” include plural references unless the context clearly dictates otherwise. In this application, the use of “or” means “and/or” unless stated otherwise, and is understood to be inclusive. Furthermore, use of the term “including” as well as other forms, such as “include,” “includes,” and “included,” is not limiting.

[0042] As used in this specification and claim(s), the words “comprising” (and any form of comprising, such as “comprise” and “comprises”), “having” (and any form of having, such as “have” and “has”), “including” (and any form of including, such as “includes” and “include”) or “containing” (and any form of containing, such as “contains” and “contain”) are inclusive or open-ended and do not exclude additional, unrecited elements or method steps. It is contemplated that any embodiment discussed in this specification can be implemented with respect to any method or composition of the present disclosure, and vice versa. Furthermore, compositions of the present disclosure can be used to achieve methods of the present disclosure.

[0043] The term “about” or “approximately” means within an acceptable error range for the particular value as determined by one of ordinary skill in the art, which will depend in part on how the value is measured or determined, i.e., the limitations of the measurement system. For example, “about” can mean within one (1) or more than one (1) standard deviation, per the practice in the art. Alternatively, “about” can mean a range of up to 20%, up to 10%, up to 5%, or up to 1% of a given value. Alternatively, particularly with respect to biological systems or processes, the term can mean within an order of magnitude, preferably within 5-fold, and more preferably within 2-fold, of a value. Where particular values are described in the application and claims, unless otherwise stated the term “about” means within an acceptable error range for the particular value should be assumed.

[0044] Ranges provided herein are understood to be shorthand for all of the values within the range. For example, a range of 1 to 50 is understood to include any number, combination of numbers, or sub-range from the group consisting 1, 2, 3, 4, 5, 6, 7, 8, 9, 10, 11, 12, 13, 14, 15, 16, 17, 18, 19, 20, 21, 22, 23, 24, 25, 26, 27, 28, 29, 30, 31, 32, 33, 34, 35, 36, 37, 38, 39, 40, 41, 42, 43, 44, 45, 46, 47, 48, 49, or 50.

[0045] Reference in the specification to “some embodiments,” “an embodiment,” “one embodiment” or “other embodiments” means that a particular feature, structure, or characteristic described in connection with the embodiments is included in at least some embodiments, but not necessarily all embodiments, of the present disclosures.

[0046] By “adenosine deaminase” is meant a polypeptide or fragment thereof capable of catalyzing the hydrolytic deamination of adenine or adenosine. In some embodiments, the deaminase or deaminase domain is an adenosine deaminase catalyzing the hydrolytic deamination of adenosine to inosine or deoxy adenosine to deoxyinosine. In some embodiments, the adenosine deaminase catalyzes the hydrolytic deamination of adenine or adenosine in deoxyribonucleic acid (DNA). The adenosine deaminases (e.g., engineered adenosine deaminases, evolved adenosine deaminases) provided herein may be from any organism, such as a bacterium.

[0047] In some embodiments, the deaminase or deaminase domain is a variant of a naturally occurring deaminase from an organism, such as a human, chimpanzee, gorilla, monkey, cow, dog, rat, or mouse. In some embodiments, the deaminase or deaminase domain does not occur in nature. For example, in some embodiments, the deaminase or deaminase domain is at least 50%, at least 55%, at least 60%, at least 65%, at least 70%, at least 75% at least 80%, at least 85%, at least 90%, at least 91%, at least 92%, at least 93%, at least 94%, at least 95%, at least 96%, at least 97%, at least 98%, at least 99%, at least 99.1%, at least 99.2%, at least 99.3%, at least 99.4%, at least 99.5%, at least 99.6%, at least 99.7%, at least 99.8%, or at least 99.9% identical to a naturally occurring deaminase.

[0048] In some embodiments, the adenosine deaminase is a TadA deaminase. In some embodiments, the TadA deaminase is TadA variant. In some embodiments, the TadA variant is a TadA*8. A wild type TadA(wt) adenosine deaminase has the following sequence (also termed TadA reference sequence):

MSEVEFSHEYWMRHALTLAKRAWDEREVPVGAVLVHNNRVIGEGWNRPIG
RHDPTAHAEIMALRQGGLVMQNYRLIDATLYVTLEPCVMCAGAMIHSRIG
RVVFGARDAKTGAAGSLMDVLHHPGMNHRVEITEGILADECAALLSDFFR
MRRQEIKAQKKAQSSTD.

[0049] In some embodiments, the adenosine deaminase comprises an alteration in the following sequence:

MSEVEFSHEYWMRHALTLAKRARDEREVPVGAVLVLNNRVIGEGWNRAIG
LHDPTAHAEIMALRQGGLVMQNYRLIDATLYVTFEPCVMCAGAMIHSRIG
RVVFGVRNAKTGAAGSLMDVLHYPGMNHRVEITEGILADECAALLCYFFR
MPRQVFNAQKKAQSSTD
(also termed TadA*7.10).

[0050] In some embodiments, TadA*7.10 comprises at least one alteration. In some embodiments, TadA*7.10 comprises an alteration at amino acid 82 and/or 166. In particular embodiments, a variant of the above-referenced sequence comprises one or more of the following alterations: Y147T, Y147R, Q154S, Y123H, V82S, T166R, and/or Q154R. In other embodiments, the variant of the TadA*7.10 sequence comprises a combination of alterations selected from Y147T+Q154R; Y147T+Q154S; Y147R+Q154S; V82S+Q154S; V82S+Y147R; V82S+Q154R; V82S+Y123H; I76Y+V82S; V82S+Y123H+Y147T; V82S+Y123H+Y147R; V82S+Y123H+Q154R; Y147R+Q154R+Y123H; Y147R+Q154R+I76Y; Y147R+Q154R+T166R; Y123H+Y147R+Q154R+I76Y; V82S+Y123H+Y147R+Q154R; or I76Y+V82S+Y123H+Y147R+Q154R.

[0051] In other embodiments, adenosine deaminase variants are provided that include deletions comprising a deletion of the C terminus beginning at residue 149, 150, 151, 152, 153, 154, 155, 156, or 157, relative to TadA*7.10, the TadA reference sequence, or a corresponding mutation in another TadA. In other embodiments, the adenosine deaminase variant is a TadA (e.g., TadA*8) monomer comprising one or more of the following alterations: Y147T, Y147R, Q154S, Y123H, V82S, T166R, and/or Q154R, relative to TadA*7.10, the TadA reference sequence, or a corresponding mutation in another TadA. In other embodiments, the adenosine deaminase variant is a TadA (e.g., TadA*8) monomer comprising a combination of alterations selected from Y147T+Q154R; Y147T+Q154S; Y147R+Q154S; V82S+Q154S; V82S+Y147R; V82S+Q154R; V82S+Y123H; I76Y+V82S; V82S+Y123H+Y147T; V82S+Y123H+Y147R; V82S+Y123H+Q154R; Y147R+Q154R+Y123H; Y147R+Q154R+I76Y; Y147R+Q154R+T166R; Y123H+Y147R+Q154R+I76Y; V82S+Y123H+Y147R+Q154R; or I76Y+V82S+Y123H+Y147R+Q154R, relative to TadA*7.10, the TadA reference sequence, or a corresponding mutation in another TadA.

[0052] In still other embodiments, the adenosine deaminase variant is a homodimer comprising two adenosine deaminase domains (e.g., TadA*8) each having one or more of the following alterations Y147T, Y147R, Q154S, Y123H, V82S, T166R, and/or Q154R, relative to TadA*7.10, the TadA reference sequence, or a corresponding mutation in another TadA. In other embodiments, the adenosine deaminase variant is a homodimer comprising two adenosine deaminase domains (e.g., TadA*8) each having a combination of alterations selected from Y147T+Q154R; Y147T+Q154S; Y147R+Q154S; V82S+Q154S; V82S+Y147R; V82S+Q154R; V82S+Y123H; I76Y+V82S; V82S+Y123H+Y147T; V82S+Y123H+Y147R; V82S+Y123H+Q154R; Y147R+Q154R+Y123H; Y147R+Q154R+I76Y; Y147R+Q154R+T166R; Y123H+Y147R+Q154R+I76Y; V82S+Y123H+Y147R+Q154R; or I76Y+V82S+Y123H+Y147R+Q154R, relative to TadA*7.10, the TadA reference sequence, or a corresponding mutation in another TadA.

[0053] In other embodiments, the adenosine deaminase variant is a heterodimer comprising a wild-type TadA adenosine deaminase domain and an adenosine deaminase variant domain (e.g., TadA*8) comprising one or more of the following alterations Y147T, Y147R, Q154S, Y123H, V82S, T166R, and/or Q154R, relative to TadA*7.10, the TadA reference sequence, or a corresponding mutation in another TadA. In other embodiments, the adenosine deaminase variant is a heterodimer comprising a wild-type TadA adenosine deaminase domain and an adenosine deaminase variant domain (e.g. TadA*8) comprising a combination of alterations selected from the group of: Y147T+Q154R; Y147T+Q154S; Y147R+Q154S; V82S+Q154S; V82S+Y147R; V82S+Q154R; V82S+Y123H; I76Y+V82S; V82S+Y123H+Y147T; V82S+Y123H+Y147R; V82S+Y123H+Q154R; Y147R+Q154R+Y123H; Y147R+Q154R+I76Y; Y147R+Q154R+T166R; Y123H+Y147R+Q154R+I76Y; V82S+Y123H+Y147R+Q154R; and I76Y+V82S+Y123H+Y147R+Q154R, relative to TadA*7.10, the TadA reference sequence, or a corresponding mutation in another TadA.

[0054] In other embodiments, the adenosine deaminase variant is a heterodimer comprising a TadA*7.10 domain and an adenosine deaminase variant domain (e.g., TadA*8) comprising one or more of the following alterations Y147T, Y147R, Q154S, Y123H, V82S, T166R, and/or Q154R, relative to TadA*7.10, the TadA reference sequence, or a corresponding mutation in another TadA. In other embodiments, the adenosine deaminase variant is a heterodimer comprising a TadA*7.10 domain and an adenosine deaminase variant domain (e.g., TadA*8) comprising a combination of the following alterations: Y147T+Q154R; Y147T+Q154S; Y147R+Q154S; V82S+Q154S; V82S+Y147R; V82S+Q154R; V82S+Y123H; I76Y+V82S; V82S+Y123H+Y147T; V82S+Y123H+Y147R; V82S+Y123H+Q154R; Y147R+Q154R+Y123H; Y147R+Q154R+I76Y; Y147R+Q154R+T166R; Y123H+Y147R+Q154R+I76Y; V82S+Y123H+Y147R+Q154R; and I76Y+V82S+Y123H+Y147R+Q154R, relative to TadA*7.10, the TadA reference sequence, or a corresponding mutation in another TadA.

[0055] In one embodiment, the adenosine deaminase is a TadA*8 that comprises or consists essentially of the following sequence or a fragment thereof having adenosine deaminase activity:

MSEVEFSHEYWMRHALTLAKRARDEREVPVGAVLVLNNRVIGEGWNRAIG
LHDPTAHAEIMALRQGGLVMQNYRLIDATLYVTFEPCVMCAGAMIHSRIG
RVVFGVRNAKTGAAGSLMDVLHYPGMNHRVEITEGILADECAALLCTFFR
MPRQVFNAQKKAQSSTD.

[0056] In some embodiments, the TadA*8 is truncated. In some embodiments, the truncated TadA*8 is missing 1, 2, 3, 4, 5, 6, 7, 8, 9, 10, 11, 12, 13, 14, 15, 6, 17, 18, 19, or 20 N-terminal amino acid residues relative to the full length TadA*8. In some embodiments, the truncated TadA*8 is missing 1, 2, 3, 4, 5, 6, 7, 8, 9, 10, 11, 12, 13, 14, 15, 6, 17, 18, 19, or 20 C-terminal amino acid residues relative to the full length TadA*8. In some embodiments the adenosine deaminase variant is a full-length TadA*8.

[0057] In particular embodiments, an adenosine deaminase heterodimer comprises an TadA*8 domain and an adenosine deaminase domain selected from one of the following:

Staphylococcus aureus
(S. aureus) TadA:
MGSHMTNDIYFMTLAIEEAKKAAQLGEVPIGAIIT
KDDEVIARAHNLRETLQQPTAHAEHIAIERAAKVL
GSWRLEGCTLYVTLEPCVMCAGTIVMSRIPRVVYG
ADDPKGGCSGSLMNLLQQSNFNHRAIVDKGVLKEA
CSTLLTTFFKNLRANKKSTN
Bacillus subtilis (B. subtilis) TadA:
MTQDELYMKEAIKEAKKAEEKGEVPIGAVLVINGE
IIARAHNLRETEQRSIAHAEMLVIDEACKALGTWR
LEGATLYVTLEPCPMCAGAVVLSRVEKVVFGAFDP
KGGCSGTLMNLLQEERFNHQAEVVSGVLEEECGGM
LSAFFRELRKKKKAARKNLSE
Salmonella typhimurium
(S. typhimurium) TadA:
MPPAFITGVTSLSDVELDHEYWMRHALTLAKRAWD
EREVPVGAVLVHNHRVIGEGWNRPIGRHDPTAHAE
IMALRQGGLVLQNYRLLDTTLYVTLEPCVMCAGAM
VHSRIGRVVFGARDAKTGAAGSLIDVLHHPGMNHR
VEIIEGVLRDECATLLSDFFRMRRQEIKALKKADR
AEGAGPAV
Shewanella putrefaciens
(S. putrefaciens) TadA:
MDEYWMQVAMQMAEKAEAAGEVPVGAVLVKDGQQI
ATGYNLSISQHDPTAHAEILCLRSAGKKLENYRLL
DATLYITLEPCAMCAGAMVHSRIARVVYGARDEKT
GAAGTVVNLLQHPAFNHQVEVTSGVLAEACSAQLS
RFFKRRRDEKKALKLAQRAQQGIE
Haemophilus influenzae F3031
(H. influenzae) TadA:
MDAAKVRSEFDEKMMRYALELADKAEALGEIPVGA
VLVDDARNIIGEGWNLSIVQSDPTAHAEIIALRNG
AKNIQNYRLLNSTLYVTLEPCTMCAGAILHSRIKR
LVFGASDYKTGAIGSRFHFFDDYKMNHTLEITSGV
LAEECSQKLSTFFQKRREEKKIEKALLKSLSDK
Caulobacter crescentus
(C. crescentus) TadA:
MRTDESEDQDHRMMRLALDAARAAAEAGETPVGAV
ILDPSTGEVIATAGNGPIAAHDPTAHAEIAAMRAA
AAKLGNYRLTDLTLVVTLEPCAMCAGAISHARIGR
VVFGADDPKGGAVVHGPKFFAQPTCHWRPEVTGGV
LADESADLLRGFFRARRKAKI
Geobacter sulfurreducens
(G. sulfurreducens) TadA:
MSSLKKTPIRDDAYWMGKAIREAAKAAARDEVPIG
AVIVRDGAVIGRGHNLREGSNDPSAHAEMIAIRQA
ARRSANWRLTGATLYVTLEPCLMCMGAIILARLER
VVFGCYDPKGGAAGSLYDLSADPRLNHQVRLSPGV
CQEECGTMLSDFFRDLRRRKKAKATPALFIDERKV
PPEP
TadA*7.10
MSEVEFSHEYWMRHALTLAKRARDEREVPVGAVLV
LNNRVIGEGWNRAIGLHDPTAHAEIMALRQGGLVM
QNYRLIDATLYVTFEPCVMCAGAMIHSRIGRVVFG
VRNAKTGAAGSLMDVLHYPGMNHRVEITEGILADE
CAALLCYFFRMPRQVFNAQKKAQSSTD

[0058] By “Adenosine Deaminase Base Editor 8 (ABE8) polypeptide” or “ABE8” is meant a base editor as defined herein comprising an adenosine deaminase variant comprising an alteration at amino acid position 82 and/or 166 of the following reference sequence:

MSEVEFSHEYWMRHALTLAKRARDEREVPVGA
VLVLNNRVIGEGWNRAIGLHDPTAHAEIMALR
QGGLVMQNYRLIDATLYVTFEPCVMCAGAMIH
SRIGRVVFGVRNAKTGAAGSLMDVLHYPGMNH
RVEITEGILADECAALLCYFFRMPRQVFNAQK
KAQSSTD

[0059] In some embodiments, ABE8 comprises further alterations, as described herein, relative to the reference sequence.

[0060] By “Adenosine Deaminase Base Editor 8 (ABE8) polynucleotide” is meant a polynucleotide encoding an ABE8.

[0061] “Administering” is referred to herein as providing one or more compositions described herein to a patient or a subject. By way of example and without limitation, composition administration, e.g., injection, can be performed by intravenous (i.v.) injection, sub-cutaneous (s.c.) injection, intradermal (i.d.) injection, intraperitoneal (i.p.) injection, or intramuscular (i.m.) injection. One or more such routes can be employed. Parenteral administration can be, for example, by bolus injection or by gradual perfusion over time. In some embodiments, parenteral administration includes infusing or injecting intravascularly, intravenously, intramuscularly, intraarterially, intrathecally, intratumorally, intradermally, intraperitoneally, transtracheally, subcutaneously, subcuticularly, intraarticularly, subcapsularly, subarachnoidly and intrasternally. Alternatively, or concurrently, administration can be by the oral route.

[0062] By “agent” is meant any small molecule chemical compound, antibody, nucleic acid molecule, or polypeptide, or fragments thereof.

[0063] By “alteration” is meant a change (increase or decrease) in the expression levels or activity of a gene or polypeptide as detected by standard art known methods such as those described herein. As used herein, an alteration includes a 10% change in expression levels, preferably a 25% change, more preferably a 40% change, and most preferably a 50% or greater change in expression levels. By “ameliorate” is meant decrease, suppress, attenuate, diminish, arrest, or stabilize the development or progression of a disease.

[0064] By “analog” is meant a molecule that is not identical, but has analogous functional or structural features. For example, a polypeptide analog retains the biological activity of a corresponding naturally-occurring polypeptide, while having certain biochemical modifications that enhance the analog's function relative to a naturally occurring polypeptide. Such biochemical modifications could increase the analog's protease resistance, membrane permeability, and/or half-life, without altering, for example, ligand binding. An analog may include an unnatural amino acid.

[0065] By “methyl CpG binding protein 2 (Mecp2) protein” is meant a polypeptide or fragment thereof having at least about 95% amino acid sequence identity to NCBI Accession No. NP_004983. In particular embodiments, an Mecp2 protein comprises one or more alterations relative to the following reference sequence. In particular embodiments, an Mecp2 protein associated with RTT comprises one or more mutations selected from R106W, R168*, R133C, T158M, R255*, R270*, and R306C. An exemplary Mecp2 amino acid sequence is provided below.

```
    1 mvagmlglre eksedqdlqg ikdkplkfkk
        vkkdkkeeke gkhepvqpsa hhsaepaeag
  61 kaetsegsgs apavpeasas pkqrrsiird
        rgpmyddptl pegwtrklkq rksgrsagky
121 dvylinpqgk afrskvelia yfekvgdtsl
        dpndfdftvt grgspsrreq kppkkpkspk
181 apgtgrgrgr pkgsgttrpk aatsegvqvk
        rvlekspgkl Ivkmpfqtsp ggkaegggat
241 tstqvmvikr pgrkrkaead pqaipkkrgr
        kpgsvvaaaa aeakkkavke ssirsvqetv
301 Ipikkrktre tvsievkevv kpllvstlge
        ksgkglktck spgrkskess pkgrsssass
361 ppkkehhhhh hhsespkapv pllpplpppp
        pepessedpt sppepqdlss svckeekmpr
421 ggslesdgcp kepaktqpav ataataaeky
        khrgegerkd ivsssmprpn reepvdsrtp
481 vtervs
```

[0066] By “Mecp2 polynucleotide” is meant a nucleic acid molecule encoding an Mecp2 protein or fragment thereof. The sequence of an exemplary Mecp2 polynucleotide, which is available at NCBI Accession No. NM_004992, is provided below. In particular embodiments, an Mecp2 polynucleotide comprises one or more alterations relative to the following reference sequence. In particular embodiments, an Mecp2 polynucleotide associated with RTT comprises one or more mutations selected from 316C>T, 397C>T, 473C>T, 763C>T, 808C>T and 916C>T.

```
        1 ccggcgtcgg cggcgcgcgc gctccctcct ctcggagaga gggctgtggt aaaagccgtc
      61 cggaaaatgg ccgccgccgc cgccgccgcg ccgagcggag gaggaggagg aggcgaggag
    121 gagagactgc tccataaaaa tacagactca ccagttcctg ctttgatgtg acatgtgact
    181 ccccagaata caccttgctt ctgtagacca gctccaacag gattccatgg tagctgggat
    241 gttagggctc agggaagaaa agtcagaaga ccaggacctc cagggcctca aggacaaacc
    301 cctcaagttt aaaaaggtga agaaagataa gaaagaagag aaagagggca agcatgagcc
    361 cgtgcagcca tcagcccacc actctgctga gcccgcagag gcaggcaaag cagagacatc
    421 agaagggtca ggctccgccc cggctgtgcc ggaagcttct gcctccccca aacagcggcg
    481 ctccatcatc cgtgaccggg gacccatgta tgatgacccc accctgcctg aaggctggac
    541 acggaagctt aagcaaagga aatctggccg ctctgctggg aagtatgatg tgtatttgat
    601 caatccccag ggaaaagcct ttcgctctaa agtggagttg attgcgtact tcgaaaaggt
    661 aggcgacaca tccctggacc ctaatgattt tgacttcacg gtaactggga gagggagccc
    721 ctcccggcga gagcagaaac cacctaagaa gcccaaatct cccaaagctc caggaactgg
    781 cagaggccgg ggacgcccca aagggagcgg caccacgaga cccaaggcgg ccacgtcaga
    841 gggtgtgcag gtgaaaaggg tcctggagaa aagtcctggg aagctccttg tcaagatgcc
    901 ttttcaaact tcgccagggg gcaaggctga ggggggtggg gccaccacat ccacccaggt
    961 catggtgatc aaacgccccg gcaggaagcg aaaagctgag gccgaccctc aggccattcc
  1021 caagaaacgg ggccgaaagc cggggagtgt ggtggcagcc gctgccgccg aggccaaaaa
  1081 gaaagccgtg aaggagtctt ctatccgatc tgtgcaggag accgtactcc ccatcaagaa
  1141 gcgcaagacc cgggagacgg tcagcatcga ggtcaaggaa gtggtgaagc ccctgctggt
  1201 gtccaccctc ggtgagaaga gcgggaaagg actgaagacc tgtaagagcc ctgggcggaa
  1261 aagcaaggag agcagcccca aggggcgcag cagcagcgcc tcctcacccc ccaagaagga
  1321 gcaccaccac catcaccacc actcagagtc cccaaaggcc cccgtgccac tgctcccacc
  1381 cctgccccca cctccacctg agcccgagag ctccgaggac cccaccagcc cccctgagcc
  1441 ccaggacttg agcagcagcg tctgcaaaga ggagaagatg cccagaggag gctcactgga
  1501 gagcgacggc tgccccaagg agccagctaa gactcagccc gcggttgcca ccgccgccac
  1561 ggccgcagaa aagtacaaac accgagggga gggagagcgc aaagacattg tttcatcctc
  1621 catgccaagg ccaaacagag aggagcctgt ggacagccgg acgcccgtga ccgagagagt
  1681 tagctgactt tacacggagc ggattgcaaa gcaaaccaac aagaataaag gcagctgttg
  1741 tctcttctcc ttatgggtag ggctctgaca aagcttcccg attaactgaa ataaaaaata
  1801 tttttttttc tttcagtaaa cttagagttt cgtggcttca gggtgggagt agttggagca
  1861 ttggggatgt ttttcttacc gacaagcaca gtcaggttga agacctaacc agggccagaa
  1921 gtagctttgc acttttctaa actaggctcc ttcaacaagg cttgctgcag atactactga
  1981 ccagacaagc tgttgaccag gcacctcccc tcccgcccaa acctttcccc catgtggtcg
  2041 ttagagacag agcgacagag cagttgagag gacactcccg ttttcggtgc catcagtgcc
  2101 ccgtctacag ctcccccagc tccccccacc tcccccactc ccaaccacgt tgggacaggg
  2161 aggtgtgagg caggagagac agttggattc tttagagaag atggatatga ccagtggcta
  2221 tggcctgtgc gatcccaccc gtggtggctc aagtctggcc ccacaccagc cccaatccaa
  2281 aactggcaag gacgcttcac aggacaggaa agtggcacct gtctgctcca gctctggcat
  2341 ggctaggagg ggggagtccc ttgaactact gggtgtagac tggcctgaac cacaggagag
  2401 gatggcccag ggtgaggtgg catggtccat tctcaaggga cgtcctccaa cgggtggcgc
  2461 tagaggccat ggaggcagta ggacaaggtg caggcaggct ggcctggggt caggccgggc
  2521 agagcacagc ggggtgagag ggattcctaa tcactcagag cagtctgtga cttagtggac
  2581 aggggagggg gcaaaggggg aggagaagaa aatgttcttc cagttacttt ccaattctcc
  2641 tttagggaca gcttagaatt atttgcacta ttgagtcttc atgttcccac ttcaaaacaa
  2701 acagatgctc tgagagcaaa ctggcttgaa ttggtgacat ttagtccctc aagccaccag
  2761 atgtgacagt gttgagaact acctggattt gtatatatac ctgcgcttgt tttaaagtgg
  2821 gctcagcaca tagggttccc acgaagctcc gaaactctaa gtgtttgctg caattttata
  2881 aggacttcct gattggtttc tcttctcccc ttccatttct gccttttgtt catttcatcc
  2941 tttcacttct ttcccttcct ccgtcctcct ccttcctagt tcatcccttc tcttccaggc
  3001 agccgcggtg cccaaccaca cttgtcggct ccagtcccca gaactctgcc tgccctttgt
  3061 cctcctgctg ccagtaccag ccccaccctg ttttgagccc tgaggaggcc ttgggctctg
  3121 ctgagtccga cctggcctgt ctgtgaagag caagagagca gcaaggtctt gctctcctag
  3181 gtagccccct cttccctggt aagaaaaagc aaaaggcatt tcccaccctg aacaacgagc
  3241 cttttcaccc ttctactcta gagaagtgga ctggaggagc tgggcccgat ttggtagttg
  3301 aggaaagcac agaggcctcc tgtggcctgc cagtcatcga gtggcccaac aggggctcca
  3361 tgccagccga ccttgacctc actcagaagt ccagagtcta gcgtagtgca gcagggcagt
  3421 agcggtacca atgcagaact cccaagaccc gagctgggac cagtacctgg gtccccagcc
  3481 cttcctctgc tccccctttt ccctcggagt tcttcttgaa tggcaatgtt ttgcttttgc
  3541 tcgatgcaga cagggggcca gaacaccaca catttcactg tctgtctggt ccatagctgt
  3601 ggtgtagggg cttagaggca tgggcttgct gtgggttttt aattgatcag ttttcatgtg
  3661 ggatcccatc tttttaacct ctgttcagga agtccttatc tagctgcata tcttcatcat
  3721 attggtatat ccttttctgt gtttacagag atgtctctta tatctaaatc tgtccaactg
  3781 agaagtacct tatcaaagta gcaaatgaga cagcagtctt atgcttccag aaacacccac
  3841 aggcatgtcc catgtgagct gctgccatga actgtcaagt gtgtgttgtc ttgtgtattt
  3901 cagttattgt ccctggcttc cttactatgg tgtaatcatg aaggagtgaa acatcataga
  3961 aactgtctag cacttccttg ccagtcttta gtgatcagga accatagttg acagttccaa
  4021 tcagtagctt aagaaaaaac cgtgtttgtc tcttctggaa tggttagaag tgagggagtt
  4081 tgccccgttc tgtttgtaga gtctcatagt tggactttct agcatatatg tgtccatttc
  4141 cttatgctgt aaaagcaagt cctgcaacca aactcccatc agcccaatcc ctgatccctg
  4201 atcccttcca cctgctctgc tgatgacccc cccagcttca cttctgactc ttccccagga
  4261 agggaagggg ggtcagaaga gagggtgagt cctccagaac tcttcctcca aggacagaag
  4321 gctcctgccc ccatagtggc ctcgaactcc tggcactacc aaaggacact tatccacgag
  4381 agcgcagcat ccgaccaggt tgtcactgag aagatgttta ttttggtcag ttgggttttt
  4441 atgtattata cttagtcaaa tgtaatgtgg cttctggaat cattgtccag agctgcttcc
  4501 ccgtcacctg ggcgtcatct ggtcctggta agaggagtgc gtggcccacc aggcccccct
  4561 gtcacccatg acagttcatt cagggccgat ggggcagtcg tggttgggaa cacagcattt
  4621 caagcgtcac tttatttcat tcgggcccca cctgcagctc cctcaaagag gcagttgccc
  4681 agcctctttc ccttccagtt tattccagag ctgccagtgg ggcctgaggc tccttagggt
  4741 tttctctcta tttccccctt tcttcctcat tccctcgtct ttcccaaagg catcacgagt
  4801 cagtcgcctt tcagcaggca gccttggcgg tttatcgccc tggcaggcag gggccctgca
  4861 gctctcatgc tgcccctgcc ttggggtcag gttgacagga ggttggaggg aaagccttaa
  4921 gctgcaggat tctcaccagc tgtgtccggc ccagttttgg ggtgtgacct caatttcaat
  4981 tttgtctgta cttgaacatt atgaagatgg gggcctcttt cagtgaattt gtgaacagca
  5041 gaattgaccg acagctttcc agtacccatg gggctaggtc attaaggcca catccacagt
  5101 ctcccccacc cttgttccag ttgttagtta ctacctcctc tcctgacaat actgtatgtc
  5161 gtcgagctcc ccccaggtct acccctcccg gccctgcctg ctggtgggct tgtcatagcc
  5221 agtgggattg ccggtcttga cagctcagtg agctggagat acttggtcac agccaggcgc
  5281 tagcacagct cccttctgtt gatgctgtat tcccatatca aaagacacag gggacaccca
  5341 gaaacgccac atcccccaat ccatcagtgc caaactagcc aacggcccca gcttctcagc
  5401 tcgctggatg gcggaagctg ctactcgtga gcgccagtgc gggtgcagac aatcttctgt
  5461 tgggtggcat cattccaggc ccgaagcatg aacagtgcac ctgggacagg gagcagcccc
  5521 aaattgtcac ctgcttctct gcccagcttt tcattgctgt gacagtgatg gcgaaagagg
  5581 gtaataacca gacacaaact gccaagttgg gtggagaaag gagtttcttt agctgacaga
  5641 atctctgaat tttaaatcac ttagtaagcg gctcaagccc aggagggagc agagggatac
  5701 gagcggagtc ccctgcgcgg gaccatctgg aattggttta gcccaagtgg agcctgacag
  5761 ccagaactct gtgtcccccg tctaaccaca gctccttttc cagagcattc cagtcaggct
  5821 ctctgggctg actgggccag gggaggttac aggtaccagt tctttaagaa gatctttggg
  5881 catatacatt tttagcctgt gtcattgccc caaatggatt cctgtttcaa gttcacacct
  5941 gcagattcta ggacctgtgt cctagacttc agggagtcag ctgtttctag agttcctacc
  6001 atggagtggg tctggaggac ctgcccggtg ggggggcaga gccctgctcc ctccgggtct
  6061 tcctactctt ctctctgctc tgacgggatt tgttgattct ctccattttg gtgtctttct
  6121 cttttagata ttgtatcaat ctttagaaaa ggcatagtct acttgttata aatcgttagg
  6181 atactgcctc ccccagggtc taaaattaca tattagaggg gaaaagctga acactgaagt
  6241 cagttctcaa caatttagaa ggaaaaccta gaaaacattt ggcagaaaat tacatttcga
  6301 tgtttttgaa tgaatacgag caagctttta caacagtgct gatctaaaaa tacttagcac
  6361 ttggcctgag atgcctggtg agcattacag gcaaggggaa tctggaggta gccgacctga
  6421 ggacatggct tctgaacctg tcttttggga gtggtatgga aggtggagcg ttcaccagtg
  6481 acctggaagg cccagcacca ccctccttcc cactcttctc atcttgacag agcctgcccc
  6541 agcgctgacg tgtcaggaaa acacccaggg aactaggaag gcacttctgc ctgaggggca
  6601 gcctgccttg cccactcctg ctctgctcgc ctcggatcag ctgagccttc tgagctggcc
  6661 tctcactgcc tccccaaggc cccctgcctg ccctgtcagg aggcagaagg aagcaggtgt
  6721 gagggcagtg caaggaggga gcacaacccc cagctcccgc tccgggctcc gacttgtgca
  6781 caggcagagc ccagaccctg gaggaaatcc tacctttgaa ttcaagaaca tttggggaat
  6841 ttggaaatct ctttgccccc aaacccccat tctgtcctac ctttaatcag gtcctgctca
  6901 gcagtgagag cagatgaggt gaaaaggcca agaggtttgg ctcctgccca ctgatagccc
  6961 ctctccccgc agtgtttgtg tgtcaagtgg caaagctgtt cttcctggtg accctgatta
  7021 tatccagtaa cacatagact gtgcgcatag gcctgctttg tctcctctat cctgggcttt
  7081 tgttttgctt tttagttttg cttttagttt ttctgtccct tttatttaac gcaccgacta
  7141 gacacacaaa gcagttgaat ttttatatat atatctgtat attgcacaat tataaactca
  7201 ttttgcttgt ggctccacac acacaaaaaa agacctgtta aaattatacc tgttgcttaa
  7261 ttacaatatt tctgataacc atagcatagg acaagggaaa ataaaaaaag aaaaaaaaga
  7321 aaaaaaaacg acaaatctgt ctgctggtca cttcttctgt ccaagcagat tcgtggtctt
  7381 ttcctcgctt ctttcaaggg ctttcctgtg ccaggtgaag gaggctccag gcagcaccca
  7441 ggttttgcac tcttgtttct cccgtgcttg tgaaagaggt cccaaggttc tgggtgcagg
  7501 agcgctccct tgacctgctg aagtccggaa cgtagtcggc acagcctggt cgccttccac
  7561 ctctgggagc tggagtccac tggggtggcc tgactccccc agtccccttc ccgtgacctg
  7621 gtcagggtga gcccatgtgg agtcagcctc gcaggcctcc ctgccagtag ggtccgagtg
  7681 tgtttcatcc ttcccactct gtcgagcctg ggggctggag cggagacggg aggcctggcc
  7741 tgtctcggaa cctgtgagct gcaccaggta gaacgccagg gaccccagaa tcatgtgcgt
  7801 cagtccaagg ggtcccctcc aggagtagtg aagactccag aaatgtccct ttcttctccc
  7861 ccatcctacg agtaattgca tttgcttttg taattcttaa tgagcaatat ctgctagaga
  7921 gtttagctgt aacagttctt tttgatcatc tttttttaat aattagaaac accaaaaaaa
  7981 tccagaaact tgttcttcca aagcagagag cattataatc accagggcca aaagcttccc
  8041 tccctgctgt cattgcttct tctgaggcct gaatccaaaa gaaaaacagc cataggccct
  8101 ttcagtggcc gggctacccg tgagcccttc ggaggaccag ggctggggca gcctctgggc
  8161 ccacatccgg ggccagctcc ggcgtgtgtt cagtgttagc agtgggtcat gatgctcttt
  8221 cccacccagc ctgggatagg ggcagaggag gcgaggaggc cgttgccgct gatgtttggc
  8281 cgtgaacagg tgggtgtctg cgtgcgtcca cgtgcgtgtt ttctgactga catgaaatcg
  8341 acgcccgagt tagcctcacc cggtgacctc tagccctgcc cggatggagc ggggcccacc
  8401 cggttcagtg tttctgggga gctggacagt ggagtgcaaa aggcttgcag aacttgaagc
  8461 ctgctccttc ccttgctacc acggcctcct ttccgtttga tttgtcactg cttcaatcaa
  8521 taacagccgc tccagagtca gtagtcaatg aatatatgac caaatatcac caggactgtt
  8581 actcaatgtg tgccgagccc ttgcccatgc tgggctcccg tgtatctgga cactgtaacg
  8641 tgtgctgtgt ttgctcccct tccccttcct tctttgccct ttacttgtct ttctggggtt
  8701 tttctgtttg ggtttggttt ggtttttatt tctccttttg tgttccaaac atgaggttct
  8761 ctctactggt cctcttaact gtggtgttga ggcttatatt tgtgtaattt ttggtgggtg
  8821 aaaggaattt tgctaagtaa atctcttctg tgtttgaact gaagtctgta ttgtaactat
  8881 gtttaaagta attgttccag agacaaatat ttctagacac tttttcttta caaacaaaag
  8941 cattcggagg gagggggatg gtgactgaga tgagagggga gagctgaaca gatgacccct
  9001 gcccagatca gccagaagcc acccaaagca gtggagccca ggagtcccac tccaagccag
  9061 caagccgaat agctgatgtg ttgccacttt ccaagtcact gcaaaaccag gttttgttcc
  9121 gcccagtgga ttcttgtttt gcttcccctc cccccgagat tattaccacc atcccgtgct
  9181 tttaaggaaa ggcaagattg atgtttcctt gaggggagcc aggaggggat gtgtgtgtgc
  9241 agagctgaag agctggggag aatggggctg ggcccaccca agcaggaggc tgggacgctc
  9301 tgctgtgggc acaggtcagg ctaatgttgg cagatgcagc tcttcctgga caggccaggt
  9361 ggtgggcatt ctctctccaa ggtgtgcccc gtgggcatta ctgtttaaga cacttccgtc
  9421 acatcccacc ccatcctcca gggctcaaca ctgtgacatc tctattcccc accctcccct
  9481 tcccagggca ataaaatgac catggagggg gcttgcactc tcttggctgt cacccgatcg
  9541 ccagcaaaac ttagatgtga gaaaacccct tcccattcca tggcgaaaac atctccttag
  9601 aaaagccatt accctcatta ggcatggttt tgggctccca aaacacctga cagcccctcc
  9661 ctcctctgag aggcggagag tgctgactgt agtgaccatt gcatgccggg tgcagcatct
  9721 ggaagagcta ggcagggtgt ctgccccctc ctgagttgaa gtcatgctcc cctgtgccag
  9781 cccagaggcc gagagctatg gacagcattg ccagtaacac aggccaccct gtgcagaagg
  9841 gagctggctc cagcctggaa acctgtctga ggttgggaga ggtgcacttg gggcacaggg
  9901 agaggccggg acacacttag ctggagatgt ctctaaaagc cctgtatcgt attcaccttc
  9961 agtttttgtg ttttgggaca attactttag aaaataagta ggtcgtttta aaaacaaaaa
10021 ttattgattg cttttttgta gtgttcagaa aaaaggttct ttgtgtatag ccaaatgact
10081 gaaagcactg atatatttaa aaacaaaagg caatttatta aggaaatttg taccatttca
10141 gtaaacctgt ctgaatgtac ctgtatacgt ttcaaaaaca cccccccccc actgaatccc
10201 tgtaacctat ttattatata aagagtttgc cttataaatt t
```

[0067] By “base editor (BE)” or “nucleobase editor (NBE)” is meant an agent that binds a polynucleotide and has nucleobase modifying activity. In various embodiments, the base editor comprises a nucleobase modifying polypeptide (e.g., a deaminase) and a nucleic acid programmable nucleotide binding domain in conjunction with a guide polynucleotide (e.g., guide RNA). In various embodiments, the agent is a biomolecular complex comprising a protein domain having base editing activity, i.e., a domain capable of modifying a base (e.g., A, T, C, G, or U) within a nucleic acid molecule (e.g., DNA). In some embodiments, the polynucleotide programmable DNA binding domain is fused or linked to a deaminase domain. In one embodiment, the agent is a fusion protein comprising a domain having base editing activity. In another embodiment, the protein domain having base editing activity is linked to the guide RNA (e.g., via an RNA binding motif on the guide RNA and an RNA binding domain fused to the deaminase). In some embodiments, the domain having base editing activity is capable of deaminating a base within a nucleic acid molecule. In some embodiments, the base editor is capable of deaminating one or more bases within a DNA molecule. In some embodiments, the base editor is capable of deaminating an adenosine (A) within DNA. In some embodiments, the base editor is an adenosine base editor (ABE).

[0068] In some embodiments, base editors are generated (e.g., ABE8) by cloning an adenosine deaminase variant (e.g., TadA*8) into a scaffold that includes a circular permutant Cas9 (e.g., spCAS9 or saCAS9) and a bipartite nuclear localization sequence. Circular permutant Cas9's are known in the art and described, for example, in Oakes et al., Cell 176, 254-267, 2019. An exemplary circular permutant follows where the bold sequence indicates sequence derived from Cas9, the italics sequence denotes a linker sequence, and the underlined sequence denotes a bipartite nuclear localization sequence,

CP5 (with MSP “NGC=Pam Variant with mutations Regular Cas9 likes NGG” PiD=Protein Interacting Domain and “D10A” nickase):

EIGKATAKYFFYSNIMNFFKTEITLANGEIRKRPL
IETNGETGEIVWDKGRDFATVRKVLSMPQVNIVKK
TEVQTGGFSKESILPKRNSDKLIARKKDWDPKKYG
GFMQPTVAYSVLVVAKVEKGKSKKLKSVKELLGIT
IMERSSFEKNPIDFLEAKGYKEVKKDLIIKLPKYS
LFELENGRKRMLASAKFLQKGNELALPSKYVNFLY
LASHYEKLKGSPEDNEQKQLFVEQHKHYLDEIIEQ
ISEFSKRVILADANLDKVLSAYNKHRDKPIREQAE
NIIHLFTLTNLGAPRAFKYFDTTIARKEYRSTKEV
LDATLIHQSITGLYETRIDLSQLGGDGGSGGSGGS
GGSGGSGGSGGMDKKYSIGLAIGTNSVGWAVITDE
YKVPSKKFKVLGNTDRHSIKKNLIGALLFDSGETA
EATRLKRTARRRYTRRKNRICYLQEIFSNEMAKVD
DSFFHRLEESFLVEEDKKHERHPIFGNIVDEVAYH
EKYPTIYHLRKKLVDSTDKADLRLIYLALAHMIKF
RGHFLIEGDLNPDNSDVDKLFIQLVQTYNQLFEEN
PINASGVDAKAILSARLSKSRRLENLIAQLPGEKK
NGLFGNLIALSLGLTPNFKSNFDLAEDAKLQLSKD
TYDDDLDNLLAQIGDQYADLFLAAKNLSDAILLSD
ILRVNTEITKAPLSASMIKRYDEHHQDLTLLKALV
RQQLPEKYKEIFFDQSKNGYAGYIDGGASQEEFYK
FIKPILEKMDGTEELLVKLNREDLLRKQRTFDNGS
IPHQIHLGELHAILRRQEDFYPFLKDNREKIEKIL
TFRIPYYVGPLARGNSRFAWMTRKSEETITPWNFE
EVVDKGASAQSFIERMTNFDKNLPNEKVLPKHSLL
YEYFTVYNELTKVKYVTEGMRKPAFLSGEQKKAIV
DLLFKTNRKVTVKQLKEDYFKKIECFDSVEISGVE
DRFNASLGTYHDLLKIIKDKDFLDNEENEDILEDI
VLTLTLFEDREMIEERLKTYAHLFDDKVMKQLKRR
RYTGWGRLSRKLINGIRDKQSGKTILDFLKSDGFA
NRNFMQLIHDDSLTFKEDIQKAQVSGQGDSLHEHI
ANLAGSPAIKKGILQTVKVVDELVKVMGRHKPENI
VIEMARENQTTQKGQKNSRERMKRIEEGIKELGSQ
ILKEHPVENTQLQNEKLYLYYLQNGRDMYVDQELD
INRLSDYDVDHIVPQSFLKDDSIDNKVLTRSDKNR
GKSDNVPSEEVVKKMKNYWRQLLNAKLITQRKFDN
LTKAERGGLSELDKAGFIKRQLVETRQITKHVAQI
LDSRMNTKYDENDKLIREVKVITLKSKLVSDFRKD
FQFYKVREINNYHHAHDAYLNAWGTALIKKYPKLE
SEFVYGDYKVYDVRKMIAKSEQEGADKRTADGSEE
ESPKKKRKV*

[0069] In some embodiments, the base editor is an Adenosine Deaminase Base Editor 8 (ABE8). In some embodiments, the ABE8 is selected from a base editor from Table 9 infra. In some embodiments, ABE8 contains an adenosine deaminase variant evolved from TadA. In some embodiments, the adenosine deaminase variant of ABE8 is a TadA*8 variant as described in Table 9 infra. In some embodiments, the adenosine deaminase variant is TadA*7.10 variant (e.g., TadA*8) comprising one or more of an alteration selected from the group of Y147T, Y147R, Q154S, Y123H, V82S, T166R, and/or Q154R. In various embodiments, ABE8 comprises TadA*7.10 varient (e.g., TadA*8) with a combination of alterations selected from the group consisting of Y147T+Q154R; Y147T+Q154S; Y147R+Q154S; V82S+Q154S; V82S+Y147R; V82S+Q154R; V82S+Y123H; I76Y+V82S; V82S+Y123H+Y147T; V82S+Y123H+Y147R; V82S+Y123H+Q154R; Y147R+Q154R+Y123H; Y147R+Q154R+I76Y; Y147R+Q154R+T166R; Y123H+Y147R+Q154R+I76Y; V82S+Y123H+Y147R+Q154R; and I76Y+V82S+Y123H+Y147R+Q154R. In some embodiments ABE8 is a monomeric construct. In some embodiments, ABE8 is a heterodimeric construct. In some embodiments the ABE8 base editor comprises the sequence:

MSEVEFSHEYWMRHALTLAKRARDEREVPVGAVLV
LNNRVIGEGWNRAIGLHDPTAHAEIMALRQGGLVM
QNYRLIDATLYVTFEPCVMCAGAMIHSRIGRVVFG
VRNAKTGAAGSLMDVLHYPGMNHRVEITEGILADE
GAALLCTFFRMPRQVFNAQKKAQSSTD.

[0070] In some embodiments, the polynucleotide programmable DNA binding domain is a CRISPR associated (e.g., Cas or Cpf1) enzyme. In some embodiments, the base editor is a catalytically dead Cas9 (dCas9) fused to a deaminase domain. In some embodiments, the base editor is a Cas9 nickase (nCas9) fused to a deaminase domain. In some embodiments, the base editor is fused to an inhibitor of base excision repair (BER). In some embodiments, the inhibitor of base excision repair is a uracil DNA glycosylase inhibitor (UGI). In some embodiments, the inhibitor of base excision repair is an inosine base excision repair inhibitor. Details of base editors are described in International PCT Application Nos. PCT/2017/045381 (WO 2018/027078) and PCT/US2016/058344 (WO 2017/070632), each of which is incorporated herein by reference for its entirety. Also see Komor, A. C., et al., “Programmable editing of a target base in genomic DNA without double-stranded DNA cleavage” Nature 533, 420-424 (2016); Gaudelli, N. M., et al., “Programmable base editing of A⋅T to G⋅C in genomic DNA without DNA cleavage” Nature 551, 464-471 (2017); Komor, A. C., et al., “Improved base excision repair inhibition and bacteriophage Mu Gam protein yields C:G-to-T:A base editors with higher efficiency and product purity” Science Advances 3:eaao4774 (2017), and Rees, H. A., et al., “Base editing: precision chemistry on the genome and transcriptome of living cells.” Nat Rev Genet. 2018 December; 19(12):770-788. doi: 10.1038/s41576-018-0059-1, the entire contents of which are hereby incorporated by reference.

[0071] By way of example, the adenine base editor ABE as used in the base editing compositions, systems and methods described herein has the nucleic acid sequence (8877 base pairs), (Addgene, Watertown, Mass.; Gaudelli N M, et al., Nature. 2017 Nov. 23; 551(7681):464-471. doi: 10.1038/nature24644; Koblan L W, et al., Nat Biotechnol. 2018 October; 36(9):843-846. doi: 10.1038/nbt.4172.) as provided below. Polynucleotide sequences having at least 95% or greater identity to the ABE nucleic acid sequence are also encompassed.

ATATGCCAAGTACGCCCCCTATTGACGTCAATGAC
GGTAAATGGCCCGCCTGGCATTATGCCCAGTACAT
GACCTTATGGGACTTTCCTACTTGGCAGTACATCT
ACGTATTAGTCATCGCTATTACCATGGTGATGCGG
TTTTGGCAGTACATCAATGGGCGTGGATAGCGGTT
TGACTCACGGGGATTTCCAAGTCTCCACCCCATTG
ACGTCAATGGGAGTTTGTTTTGGCACCAAAATCAA
CGGGACTTTCCAAAATGTCGTAACAACTCCGCCCC
ATTGACGCAAATGGGCGGTAGGCGTGTACGGTGGG
AGGTCTATATAAGCAGAGCTGGTTTAGTGAACCGT
CAGATCCGCTAGAGATCCGCGGCCGCTAATACGAC
TCACTATAGGGAGAGCCGCCACCATGAAACGGACA
GCCGACGGAAGCGAGTTCGAGTCACCAAAGAAGAA
GCGGAAAGTCTCTGAAGTCGAGTTTAGCCACGAGT
ATTGGATGAGGCACGCACTGACCCTGGCAAAGCGA
GCATGGGATGAAAGAGAAGTCCCCGTGGGCGCCGT
GCTGGTGCACAACAATAGAGTGATCGGAGAGGGAT
GGAACAGGCCAATCGGCCGCCACGACCCTACCGCA
CACGCAGAGATCATGGCACTGAGGCAGGGAGGCCT
GGTCATGCAGAATTACCGCCTGATCGATGCCACCC
TGTATGTGACACTGGAGCCATGCGTGATGTGCGCA
GGAGCAATGATCCACAGCAGGATCGGAAGAGTGGT
GTTCGGAGCACGGGACGCCAAGACCGGCGCAGCAG
GCTCCCTGATGGATGTGCTGCACCACCCCGGCATG
AACCACCGGGTGGAGATCACAGAGGGAATCCTGGC
AGACGAGTGCGCCGCCCTGCTGAGCGATTTCTTTA
GAATGCGGAGACAGGAGATCAAGGCCCAGAAGAAG
GCACAGAGCTCCACCGACTCTGGAGGATCTAGCGG
AGGATCCTCTGGAAGCGAGACACCAGGCACAAGCG
AGTCCGCCACACCAGAGAGCTCCGGCGGCTCCTCC
GGAGGATCCTCTGAGGTGGAGTTTTCCCACGAGTA
CTGGATGAGACATGCCCTGACCCTGGCCAAGAGGG
CACGCGATGAGAGGGAGGTGCCTGTGGGAGCCGTG
CTGGTGCTGAACAATAGAGTGATCGGCGAGGGCTG
GAACAGAGCCATCGGCCTGCACGACCCAACAGCCC
ATGCCGAAATTATGGCCCTGAGACAGGGCGGCCTG
GTCATGCAGAACTACAGACTGATTGACGCCACCCT
GTACGTGACATTCGAGCCTTGCGTGATGTGCGCCG
GCGCCATGATCCACTCTAGGATCGGCCGCGTGGTG
TTTGGCGTGAGGAACGCAAAAACCGGCGCCGCAGG
CTCCCTGATGGACGTGCTGCACTACCCCGGCATGA
ATCACCGCGTCGAAATTACCGAGGGAATCCTGGCA
GATGAATGTGCCGCCCTGCTGTGCTATTTCTTTCG
GATGCCTAGACAGGTGTTCAATGCTCAGAAGAAGG
CCCAGAGCTCCACCGACTCCGGAGGATCTAGCGGA
GGCTCCTCTGGCTCTGAGACACCTGGCACAAGCGA
GAGCGCAACACCTGAAAGCAGCGGGGGCAGCAGCG
GGGGGTCAGACAAGAAGTACAGCATCGGCCTGGCC
ATCGGCACCAACTCTGTGGGCTGGGCCGTGATCAC
CGACGAGTACAAGGTGCCCAGCAAGAAATTCAAGG
TGCTGGGCAACACCGACCGGCACAGCATCAAGAAG
AACCTGATCGGAGCCCTGCTGTTCGACAGCGGCGA
AACAGCCGAGGCCACCCGGCTGAAGAGAACCGCCA
GAAGAAGATACACCAGACGGAAGAACCGGATCTGC
TATCTGCAAGAGATCTTCAGCAACGAGATGGCCAA
GGTGGACGACAGCTTCTTCCACAGACTGGAAGAGT
CCTTCCTGGTGGAAGAGGATAAGAAGCACGAGCGG
CACCCCATCTTCGGCAACATCGTGGACGAGGTGGC
CTACCACGAGAAGTACCCCACCATCTACCACCTGA
GAAAGAAACTGGTGGACAGCACCGACAAGGCCGAC
CTGCGGCTGATCTATCTGGCCCTGGCCCACATGAT
CAAGTTCCGGGGCCACTTCCTGATCGAGGGCGACC
TGAACCCCGACAACAGCGACGTGGACAAGCTGTTC
ATCCAGCTGGTGCAGACCTACAACCAGCTGTTCGA
GGAAAACCCCATCAACGCCAGCGGCGTGGACGCCA
AGGCCATCCTGTCTGCCAGACTGAGCAAGAGCAGA
CGGCTGGAAAATCTGATCGCCCAGCTGCCCGGCGA
GAAGAAGAATGGCCTGTTCGGAAACCTGATTGCCC
TGAGCCTGGGCCTGACCCCCAACTTCAAGAGCAAC
TTCGACCTGGCCGAGGATGCCAAACTGCAGCTGAG
CAAGGACACCTACGACGACGACCTGGACAACCTGC
TGGCCCAGATCGGCGACCAGTACGCCGACCTGTTT
CTGGCCGCCAAGAACCTGTCCGACGCCATCCTGCT
GAGCGACATCCTGAGAGTGAACACCGAGATCACCA
AGGCCCCCCTGAGCGCCTCTATGATCAAGAGATAC
GACGAGCACCACCAGGACCTGACCCTGCTGAAAGC
TCTCGTGCGGCAGCAGCTGCCTGAGAAGTACAAAG
AGATTTTCTTCGACCAGAGCAAGAACGGCTACGCC
GGCTACATTGACGGCGGAGCCAGCCAGGAAGAGTT
CTACAAGTTCATCAAGCCCATCCTGGAAAAGATGG
ACGGCACCGAGGAACTGCTCGTGAAGCTGAACAGA
GAGGACCTGCTGCGGAAGCAGCGGACCTTCGACAA
CGGCAGCATCCCCCACCAGATCCACCTGGGAGAGC
TGCACGCCATTCTGCGGCGGCAGGAAGATTTTTAC
CCATTCCTGAAGGACAACCGGGAAAAGATCGAGAA
GATCCTGACCTTCCGCATCCCCTACTACGTGGGCC
CTCTGGCCAGGGGAAACAGCAGATTCGCCTGGATG
ACCAGAAAGAGCGAGGAAACCATCACCCCCTGGAA
CTTCGAGGAAGTGGTGGACAAGGGCGCTTCCGCCC
AGAGCTTCATCGAGCGGATGACCAACTTCGATAAG
AACCTGCCCAACGAGAAGGTGCTGCCCAAGCACAG
CCTGCTGTACGAGTACTTCACCGTGTATAACGAGC
TGACCAAAGTGAAATACGTGACCGAGGGAATGAGA
AAGCCCGCCTTCCTGAGCGGCGAGCAGAAAAAGGC
CATCGTGGACCTGCTGTTCAAGACCAACCGGAAAG
TGACCGTGAAGCAGCTGAAAGAGGACTACTTCAAG
AAAATCGAGTGCTTCGACTCCGTGGAAATCTCCGG
CGTGGAAGATCGGTTCAACGCCTCCCTGGGCACAT
ACCACGATCTGCTGAAAATTATCAAGGACAAGGAC
TTCCTGGACAATGAGGAAAACGAGGACATTCTGGA
AGATATCGTGCTGACCCTGACACTGTTTGAGGACA
GAGAGATGATCGAGGAACGGCTGAAAACCTATGCC
CACCTGTTCGACGACAAAGTGATGAAGCAGCTGAA
GCGGCGGAGATACACCGGCTGGGGCAGGCTGAGCC
GGAAGCTGATCAACGGCATCCGGGACAAGCAGTCC
GGCAAGACAATCCTGGATTTCCTGAAGTCCGACGG
CTTCGCCAACAGAAACTTCATGCAGCTGATCCACG
ACGACAGCCTGACCTTTAAAGAGGACATCCAGAAA
GCCCAGGTGTCCGGCCAGGGCGATAGCCTGCACGA
GCACATTGCCAATCTGGCCGGCAGCCCCGCCATTA
AGAAGGGCATCCTGCAGACAGTGAAGGTGGTGGAC
GAGCTCGTGAAAGTGATGGGCCGGCACAAGCCCGA
GAACATCGTGATCGAAATGGCCAGAGAGAACCAGA
CCACCCAGAAGGGACAGAAGAACAGCCGCGAGAGA
ATGAAGCGGATCGAAGAGGGCATCAAAGAGCTGGG
CAGCCAGATCCTGAAAGAACACCCCGTGGAAAACA
CCCAGCTGCAGAACGAGAAGCTGTACCTGTACTAC
CTGCAGAATGGGCGGGATATGTACGTGGACCAGGA
ACTGGACATCAACCGGCTGTCCGACTACGATGTGG
ACCATATCGTGCCTCAGAGCTTTCTGAAGGACGAC
TCCATCGACAACAAGGTGCTGACCAGAAGCGACAA
GAACCGGGGCAAGAGCGACAACGTGCCCTCCGAAG
AGGTCGTGAAGAAGATGAAGAACTACTGGCGGCAG
CTGCTGAACGCCAAGCTGATTACCCAGAGAAAGTT
CGACAATCTGACCAAGGCCGAGAGAGGCGGCCTGA
GCGAACTGGATAAGGCCGGCTTCATCAAGAGACAG
CTGGTGGAAACCCGGCAGATCACAAAGCACGTGGC
ACAGATCCTGGACTCCCGGATGAACACTAAGTACG
ACGAGAATGACAAGCTGATCCGGGAAGTGAAAGTG
ATCACCCTGAAGTCCAAGCTGGTGTCCGATTTCCG
GAAGGATTTCCAGTTTTACAAAGTGCGCGAGATCA
ACAACTACCACCACGCCCACGACGCCTACCTGAAC
GCCGTCGTGGGAACCGCCCTGATCAAAAAGTACCC
TAAGCTGGAAAGCGAGTTCGTGTACGGCGACTACA
AGGTGTACGACGTGCGGAAGATGATCGCCAAGAGC
GAGCAGGAAATCGGCAAGGCTACCGCCAAGTACTT
CTTCTACAGCAACATCATGAACTTTTTCAAGACCG
AGATTACCCTGGCCAACGGCGAGATCCGGAAGCGG
CCTCTGATCGAGACAAACGGCGAAACCGGGGAGAT
CGTGTGGGATAAGGGCCGGGATTTTGCCACCGTGC
GGAAAGTGCTGAGCATGCCCCAAGTGAATATCGTG
AAAAAGACCGAGGTGCAGACAGGCGGCTTCAGCAA
AGAGTCTATCCTGCCCAAGAGGAACAGCGATAAGC
TGATCGCCAGAAAGAAGGACTGGGACCCTAAGAAG
TACGGCGGCTTCGACAGCCCCACCGTGGCCTATTC
TGTGCTGGTGGTGGCCAAAGTGGAAAAGGGCAAGT
CCAAGAAACTGAAGAGTGTGAAAGAGCTGCTGGGG
ATCACCATCATGGAAAGAAGCAGCTTCGAGAAGAA
TCCCATCGACTTTCTGGAAGCCAAGGGCTACAAAG
AAGTGAAAAAGGACCTGATCATCAAGCTGCCTAAG
TACTCCCTGTTCGAGCTGGAAAACGGCCGGAAGAG
AATGCTGGCCTCTGCCGGCGAACTGCAGAAGGGAA
ACGAACTGGCCCTGCCCTCCAAATATGTGAACTTC
CTGTACCTGGCCAGCCACTATGAGAAGCTGAAGGG
CTCCCCCGAGGATAATGAGCAGAAACAGCTGTTTG
TGGAACAGCACAAGCACTACCTGGACGAGATCATC
GAGCAGATCAGCGAGTTCTCCAAGAGAGTGATCCT
GGCCGACGCTAATCTGGACAAAGTGCTGTCCGCCT
ACAACAAGCACCGGGATAAGCCCATCAGAGAGCAG
GCCGAGAATATCATCCACCTGTTTACCCTGACCAA
TCTGGGAGCCCCTGCCGCCTTCAAGTACTTTGACA
CCACCATCGACCGGAAGAGGTACACCAGCACCAAA
GAGGTGCTGGACGCCACCCTGATCCACCAGAGCAT
CACCGGCCTGTACGAGACACGGATCGACCTGTCTC
AGCTGGGAGGTGACTCTGGCGGCTCAAAAAGAACC
GCCGACGGCAGCGAATTCGAGCCCAAGAAGAAGAG
GAAAGTCTAACCGGTCATCATCACCATCACCATTG
AGTTTAAACCCGCTGATCAGCCTCGACTGTGCCTT
CTAGTTGCCAGCCATCTGTTGTTTGCCCCTCCCCC
GTGCCTTCCTTGACCCTGGAAGGTGCCACTCCCAC
TGTCCTTTCCTAATAAAATGAGGAAATTGCATCGC
ATTGTCTGAGTAGGTGTCATTCTATTCTGGGGGGT
GGGGTGGGGCAGGACAGCAAGGGGGAGGATTGGGA
AGACAATAGCAGGCATGCTGGGGATGCGGTGGGCT
CTATGGCTTCTGAGGCGGAAAGAACCAGCTGGGGC
TCGATACCGTCGACCTCTAGCTAGAGCTTGGCGTA
ATCATGGTCATAGCTGTTTCCTGTGTGAAATTGTT
ATCCGCTCACAATTCCACACAACATACGAGCCGGA
AGCATAAAGTGTAAAGCCTAGGGTGCCTAATGAGT
GAGCTAACTCACATTAATTGCGTTGCGCTCACTGC
CCGCTTTCCAGTCGGGAAACCTGTCGTGCCAGCTG
CATTAATGAATCGGCCAACGCGCGGGGAGAGGCGG
TTTGCGTATTGGGCGCTCTTCCGCTTCCTCGCTCA
CTGACTCGCTGCGCTCGGTCGTTCGGCTGCGGCGA
GCGGTATCAGCTCACTCAAAGGCGGTAATACGGTT
ATCCACAGAATCAGGGGATAACGCAGGAAAGAACA
TGTGAGCAAAAGGCCAGCAAAAGGCCAGGAACCGT
AAAAAGGCCGCGTTGCTGGCGTTTTTCCATAGGCT
CCGCCCCCCTGACGAGCATCACAAAAATCGACGCT
CAAGTCAGAGGTGGCGAAACCCGACAGGACTATAA
AGATACCAGGCGTTTCCCCCTGGAAGCTCCCTCGT
GCGCTCTCCTGTTCCGACCCTGCCGCTTACCGGAT
ACCTGTCCGCCTTTCTCCCTTCGGGAAGCGTGGCG
CTTTCTCATAGCTCACGCTGTAGGTATCTCAGTTC
GGTGTAGGTCGTTCGCTCCAAGCTGGGCTGTGTGC
ACGAACCCCCCGTTCAGCCCGACCGCTGCGCCTTA
TCCGGTAACTATCGTCTTGAGTCCAACCCGGTAAG
ACACGACTTATCGCCACTGGCAGCAGCCACTGGTA
ACAGGATTAGCAGAGCGAGGTATGTAGGCGGTGCT
ACAGAGTTCTTGAAGTGGTGGCCTAACTACGGCTA
CACTAGAAGAACAGTATTTGGTATCTGCGCTCTGC
TGAAGCCAGTTACCTTCGGAAAAAGAGTTGGTAGC
TCTTGATCCGGCAAACAAACCACCGCTGGTAGCGG
TGGTTTTTTTGTTTGCAAGCAGCAGATTACGCGCA
GAAAAAAAGGATCTCAAGAAGATCCTTTGATCTTT
TCTACGGGGTCTGACACTCAGTGGAACGAAAACTC
ACGTTAAGGGATTTTGGTCATGAGATTATCAAAAA
GGATCTTCACCTAGATCCTTTTAAATTAAAAATGA
AGTTTTAAATCAATCTAAAGTATATATGAGTAAAC
TTGGTCTGACAGTTACCAATGCTTAATCAGTGAGG
CACCTATCTCAGCGATCTGTCTATTTCGTTCATCC
ATAGTTGCCTGACTCCCCGTCGTGTAGATAACTAC
GATACGGGAGGGCTTACCATCTGGCCCCAGTGCTG
CAATGATACCGCGAGACCCACGCTCACCGGCTCCA
GATTTATCAGCAATAAACCAGCCAGCCGGAAGGGC
CGAGCGCAGAAGTGGTCCTGCAACTTTATCCGCCT
CCATCCAGTCTATTAATTGTTGCCGGGAAGCTAGA
GTAAGTAGTTCGCCAGTTAATAGTTTGCGCAACGT
TGTTGCCATTGCTACAGGCATCGTGGTGTCACGCT
CGTCGTTTGGTATGGCTTCATTCAGCTCCGGTTCC
CAACGATCAAGGCGAGTTACATGATCCCCCATGTT
GTGCAAAAAAGCGGTTAGCTCCTTCGGTCCTCCGA
TCGTTGTCAGAAGTAAGTTGGCCGCAGTGTTATCA
CTCATGGTTATGGCAGCACTGCATAATTCTCTTAC
TGTCATGCCATCCGTAAGATGCTTTTCTGTGACTG
GTGAGTACTCAACCAAGTCATTCTGAGAATAGTGT
ATGCGGCGACCGAGTTGCTCTTGCCCGGCGTCAAT
ACGGGATAATACCGCGCCACATAGCAGAACTTTAA
AAGTGCTCATCATTGGAAAACGTTCTTCGGGGCGA
AAACTCTCAAGGATCTTACCGCTGTTGAGATCCAG
TTCGATGTAACCCACTCGTGCACCCAACTGATCTT
CAGCATCTTTTACTTTCACCAGCGTTTCTGGGTGA
GCAAAAACAGGAAGGCAAAATGCCGCAAAAAAGGG
AATAAGGGCGACACGGAAATGTTGAATACTCATAC
TCTTCCTTTTTCAATATTATTGAAGCATTTATCAG
GGTTATTGTCTCATGAGCGGATACATATTTGAATG
TATTTAGAAAAATAAACAAATAGGGGTTCCGCGCA
CATTTCCCCGAAAAGTGCCACCTGACGTCGACGGA
TCGGGAGATCGATCTCCCGATCCCCTAGGGTCGAC
TCTCAGTACAATCTGCTCTGATGCCGCATAGTTAA
GCCAGTATCTGCTCCCTGCTTGTGTGTTGGAGGTC
GCTGAGTAGTGCGCGAGCAAAATTTAAGCTACAAC
AAGGCAAGGCTTGACCGACAATTGCATGAAGAATC
TGCTTAGGGTTAGGCGTTTTGCGCTGCTTCGCGAT
GTACGGGCCAGATATACGCGTTGACATTGATTATT
GACTAGTTATTAATAGTAATCAATTACGGGGTCAT
TAGTTCATAGCCCATATATGGAGTTCCGCGTTACA
TAACTTACGGTAAATGGCCCGCCTGGCTGACCGCC
CAACGACCCCCGCCCATTGACGTCAATAATGACGT
ATGTTCCCATAGTAACGCCAATAGGGACTTTCCAT
TGACGTCAATGGGTGGAGTATTTACGGTAAACTGC
CCACTTGGCAGTACATCAAGTGTATC

[0072] By “base editing activity” is meant acting to chemically alter a base within a polynucleotide. In one embodiment, a first base is converted to a second base. In one embodiment, e.g., the base editing activity is adenosine or adenine deaminase activity, e.g., converting A⋅T to G⋅C.

[0073] In some embodiments, base editing activity is assessed by efficiency of editing. Base editing efficiency may be measured by any suitable means, for example, by sanger sequencing or next generation sequencing. In some embodiments, base editing efficiency is measured by percentage of total sequencing reads with nucleobase conversion effected by the base editor, for example, percentage of total sequencing reads with target A⋅T base pair converted to a G⋅C base pair. In some embodiments, base editing efficiency is measured by percentage of total cells with nucleobase conversion effected by the base editor, when base editing is performed in a population of cells.

[0074] The term “base editor system” refers to a system for editing a nucleobase of a target nucleotide sequence. In various embodiments, the base editor (BE) system comprises (1) a polynucleotide programmable nucleotide binding domain (e.g., Cas9); (2) a deaminase domain for deaminating said nucleobase (e.g. an adenosine deaminase); and (3) one or more guide polynucleotides (e.g., guide RNA). In some embodiments, the polynucleotide programmable nucleotide binding domain is a polynucleotide programmable DNA binding domain. In some embodiments, the base editor is an adenine or adenosine base editor (ABE). In some embodiments, the base editor system is and Adenosine Deaminase Base Editor (ABE8). In some embodiments, the ABE8 is a monomeric construct. In some embodiments, the ABE8 is ABE8.1-m, ABE8.2-m, ABE8.3-m, ABE8.4-m, ABE8.5-m, ABE8.6-m, ABE8.7-m, ABE8.8-m, ABE8.9-m, ABE8.10-m, ABE8.11-m, ABE8.12-m, ABE8.13-m, ABE8.14-m, ABE8.15-m, ABE8.16-m, ABE8.17-m, ABE8.18-m, ABE8.19-m, ABE8.20-m, ABE8.21-m, ABE8.22-m, ABE8.23-m, ABE8.24-m. In some embodiments, the ABE8 is a heteromeric construct. In some embodiments, the ABE8 is ABE8.1-d, ABE8.2-d, ABE8.3-d, ABE8.4-d, ABE8.5-d, ABE8.6-d, ABE8.7-d, ABE8.8-d, ABE8.9-d, ABE8.10-d, ABE8.11-d, ABE8.12-d, ABE8.13-d, ABE8.14-d, ABE8.15-d, ABE8.16-d, ABE8.17-d, ABE8.18-d, ABE8.19-d, ABE8.20-d, ABE8.21-d, ABE8.22-d, ABE8.23-d, or ABE8.24-d.

[0075] In some embodiments, a nucleobase editor system may comprise more than one base editing component. For example, a base editor system may include one or more adenosine deaminases. In some embodiments, a single guide polynucleotide may be utilized to target different deaminases to a target nucleic acid sequence. In some embodiments, a single pair of guide polynucleotides may be utilized to target different deaminases to a target nucleic acid sequence.

[0076] The deaminase domain and the polynucleotide programmable nucleotide binding component of a base editor system may be associated with each other covalently or non-covalently, or any combination of associations and interactions thereof. For example, in some embodiments, a deaminase domain can be targeted to a target nucleotide sequence by a polynucleotide programmable nucleotide binding domain. In some embodiments, a polynucleotide programmable nucleotide binding domain can be fused or linked to a deaminase domain. In some embodiments, a polynucleotide programmable nucleotide binding domain can target a deaminase domain to a target nucleotide sequence by non-covalently interacting with or associating with the deaminase domain. For example, in some embodiments, the deaminase domain can comprise an additional heterologous portion or domain that is capable of interacting with, associating with, or capable of forming a complex with an additional heterologous portion or domain that is part of a polynucleotide programmable nucleotide binding domain. In some embodiments, the additional heterologous portion may be capable of binding to, interacting with, associating with, or forming a complex with a polypeptide. In some embodiments, the additional heterologous portion may be capable of binding to, interacting with, associating with, or forming a complex with a polynucleotide. In some embodiments, the additional heterologous portion may be capable of binding to a guide polynucleotide. In some embodiments, the additional heterologous portion may be capable of binding to a polypeptide linker. In some embodiments, the additional heterologous portion may be capable of binding to a polynucleotide linker. The additional heterologous portion may be a protein domain. In some embodiments, the additional heterologous portion may be a K Homology (KH) domain, a MS2 coat protein domain, a PP7 coat protein domain, a SfMu Com coat protein domain, a steril alpha motif, a telomerase Ku binding motif and Ku protein, a telomerase Sm7 binding motif and Sm7 protein, or a RNA recognition motif.

[0077] A base editor system may further comprise a guide polynucleotide component. It should be appreciated that components of the base editor system may be associated with each other via covalent bonds, noncovalent interactions, or any combination of associations and interactions thereof. In some embodiments, a deaminase domain can be targeted to a target nucleotide sequence by a guide polynucleotide. For example, in some embodiments, the deaminase domain can comprise an additional heterologous portion or domain (e.g., polynucleotide binding domain such as an RNA or DNA binding protein) that is capable of interacting with, associating with, or capable of forming a complex with a portion or segment (e.g., a polynucleotide motif) of a guide polynucleotide. In some embodiments, the additional heterologous portion or domain (e.g., polynucleotide binding domain such as an RNA or DNA binding protein) can be fused or linked to the deaminase domain. In some embodiments, the additional heterologous portion may be capable of binding to, interacting with, associating with, or forming a complex with a polypeptide. In some embodiments, the additional heterologous portion may be capable of binding to, interacting with, associating with, or forming a complex with a polynucleotide. In some embodiments, the additional heterologous portion may be capable of binding to a guide polynucleotide. In some embodiments, the additional heterologous portion may be capable of binding to a polypeptide linker. In some embodiments, the additional heterologous portion may be capable of binding to a polynucleotide linker. The additional heterologous portion may be a protein domain. In some embodiments, the additional heterologous portion may be a K Homology (KH) domain, a MS2 coat protein domain, a PP7 coat protein domain, a SfMu Com coat protein domain, a sterile alpha motif, a telomerase Ku binding motif and Ku protein, a telomerase Sm7 binding motif and Sm7 protein, or a RNA recognition motif.

[0078] In some embodiments, a base editor system can further comprise an inhibitor of base excision repair (BER) component. It should be appreciated that components of the base editor system may be associated with each other via covalent bonds, noncovalent interactions, or any combination of associations and interactions thereof. The inhibitor of BER component may comprise a base excision repair (BER) inhibitor. In some embodiments, the inhibitor of base excision repair (BER) can be a uracil DNA glycosylase inhibitor (UGI). In some embodiments, the inhibitor of base excision repair can be an inosine base excision repair (BER) inhibitor. In some embodiments, the inhibitor of base excision repair (BER) can be targeted to the target nucleotide sequence by the polynucleotide programmable nucleotide binding domain. In some embodiments, a polynucleotide programmable nucleotide binding domain can be fused or linked to an inhibitor of base excision repair (BER). In some embodiments, a polynucleotide programmable nucleotide binding domain can be fused or linked to a deaminase domain and an inhibitor of base excision repair (BER). In some embodiments, a polynucleotide programmable nucleotide binding domain can target an inhibitor of base excision repair to a target nucleotide sequence by non-covalently interacting with or associating with the inhibitor of base excision repair (BER). For example, in some embodiments, the inhibitor of base excision repair (BER) component can comprise an additional heterologous portion or domain that is capable of interacting with, associating with, or capable of forming a complex with an additional heterologous portion or domain that is part of a polynucleotide programmable nucleotide binding domain. In some embodiments, the inhibitor of base excision repair (BER) can be targeted to the target nucleotide sequence by the guide polynucleotide. For example, in some embodiments, the inhibitor of base excision repair (BER) can comprise an additional heterologous portion or domain (e.g., polynucleotide binding domain such as an RNA or DNA binding protein) that is capable of interacting with, associating with, or capable of forming a complex with a portion or segment (e.g., a polynucleotide motif) of a guide polynucleotide. In some embodiments, the additional heterologous portion or domain of the guide polynucleotide (e.g., polynucleotide binding domain such as an RNA or DNA binding protein) can be fused or linked to the inhibitor of base excision repair (BER). In some embodiments, the additional heterologous portion may be capable of binding to, interacting with, associating with, or forming a complex with a polynucleotide. In some embodiments, the additional heterologous portion may be capable of binding to a guide polynucleotide. In some embodiments, the additional heterologous portion may be capable of binding to a polypeptide linker. In some embodiments, the additional heterologous portion may be capable of binding to a polynucleotide linker. The additional heterologous portion may be a protein domain. In some embodiments, the additional heterologous portion may be a K Homology (KH) domain, a MS2 coat protein domain, a PP7 coat protein domain, a SfMu Com coat protein domain, a sterile alpha motif, a telomerase Ku binding motif and Ku protein, a telomerase Sm7 binding motif and Sm7 protein, or a RNA recognition motif.

[0079] The term “Cas9” or “Cas9 domain” refers to an RNA guided nuclease comprising a Cas9 protein, or a fragment thereof (e.g., a protein comprising an active, inactive, or partially active DNA cleavage domain of Cas9, and/or the gRNA binding domain of Cas9). A Cas9 nuclease is also referred to sometimes as a Casn1 nuclease or a CRISPR (clustered regularly interspaced short palindromic repeat) associated nuclease. CRISPR is an adaptive immune system that provides protection against mobile genetic elements (viruses, transposable elements and conjugative plasmids). CRISPR clusters contain spacers, sequences complementary to antecedent mobile elements, and target invading nucleic acids. CRISPR clusters are transcribed and processed into CRISPR RNA (crRNA). In type II CRISPR systems correct processing of pre-crRNA requires a trans-encoded small RNA (tracrRNA), endogenous ribonuclease 3 (rnc) and a Cas9 protein. The tracrRNA serves as a guide for ribonuclease 3-aided processing of pre-crRNA. Subsequently, Cas9/crRNA/tracrRNA endonucleolytically cleaves linear or circular dsDNA target complementary to the spacer. The target strand not complementary to crRNA is first cut endonucleolytically, then trimmed 3″-5′ exonucleolytically. In nature, DNA-binding and cleavage typically requires protein and both RNAs. However, single guide RNAs (“sgRNA,” or simply “gRNA”) can be engineered so as to incorporate aspects of both the crRNA and tracrRNA into a single RNA species. See, e.g., Jinek M., et al., Science 337:816-821(2012), the entire contents of which is hereby incorporated by reference. Cas9 recognizes a short motif in the CRISPR repeat sequences (the PAM or protospacer adjacent motif) to help distinguish self versus non-self. Cas9 nuclease sequences and structures are well known to those of skill in the art (see, e.g., “Complete genome sequence of an M1 strain of Streptococcus pyogenes.” Ferretti et al., Proc. Natl. Acad. Sci. U.S.A. 98:4658-4663(2001); “CRISPR RNA maturation by trans-encoded small RNA and host factor RNase III.” Deltcheva E., et al., Nature 471:602-607(2011); and “A programmable dual-RNA-guided DNA endonuclease in adaptive bacterial immunity.” Jinek M., et al., Science 337:816-821(2012), the entire contents of each of which are incorporated herein by reference). Cas9 orthologs have been described in various species, including, but not limited to, S. pyogenes and S. thermophilus. Additional suitable Cas9 nucleases and sequences will be apparent to those of skill in the art based on this disclosure, and such Cas9 nucleases and sequences include Cas9 sequences from the organisms and loci disclosed in Chylinski, Rhun, and Charpentier, “The tracrRNA and Cas9 families of type II CRISPR-Cas immunity systems” (2013) RNA Biology 10:5, 726-737; the entire contents of which are incorporated herein by reference.

[0080] An exemplary Cas9, is Streptococcus pyogenes Cas9 (spCas9), the amino acid sequence of which is provided below:

MDKKYSIGLDIGTNSVGWAVITDDYKVPSKKFKVL
GNTDRHSIKKNLIGALLFGSGETAEATRLKRTARR
RYTRRKNRICYLQEIFSNEMAKVDDSFFHRLEESF
LVEEDKKHERHPIFGNIVDEVAYHEKYPTIYHLRK
KLADSTDKADLRLIYLALAHMIKFRGHFLIEGDLN
PDNSDVDKLFIQLVQIYNQLFEENPINASRVDAKA
ILSARLSKSRRLENLIAQLPGEKRNGLFGNLIALS
LGLTPNFKSNFDLAEDAKLQLSKDTYDDDLDNLLA
QIGDQYADLFLAAKNLSDAILLSDILRVNSEITKA
PLSASMIKRYDEHHQDLTLLKALVRQQLPEKYKEI
FFDQSKNGYAGYIDGGASQEEFYKFIKPILEKMDG
TEELLVKLNREDLLRKQRTFDNGSIPHQIHLGELH
AILRRQEDFYPFLKDNREKIEKILTFRIPYYVGPL
ARGNSRFAWMTRKSEETITPWNFEEVVDKGASAQS
FIERMTNFDKNLPNEKVLPKHSLLYEYFTVYNELT
KVKYVTEGMRKPAFLSGEQKKAIVDLLFKTNRKVT
VKQLKEDYFKKIECFDSVEISGVEDRFNASLGAYH
DLLKIIKDKDFLDNEENEDILEDIVLTLTLFEDRG
MIEERLKTYAHLFDDKVMKQLKRRRYTGWGRLSRK
LINGIRDKQSGKTILDFLKSDGFANRNFMQLIHDD
SLTFKEDIQKAQVSGQGHSLHEQIANLAGSPAIKK
GILQTVKIVDELVKVMGHKPENIVIEMARENQTTQ
KGQKNSRERMKRIEEGIKELGSQILKEHPVENTQL
QNEKLYLYYLQNGRDMYVDQELDINRLSDYDVDHI
VPQSFIKDDSIDNKVLTRSDKNRGKSDNVPSEEVV
KKMKNYWRQLLNAKLITQRKFDNLTKAERGGLSEL
DKAGFIKRQLVETRQITKHVAQILDSRMNTKYDEN
DKLIREVKVITLKSKLVSDFRKDFQFYKVREINNY
HHAHDAYLNAVVGTALIKKYPKLESEFVYGDYKVY
DVRKMIAKSEQEIGKATAKYFFYSNIMNFFKTEIT
LANGEIRKRPLIETNGETGEIVWDKGRDFATVRKV
LSMPQVNIVKKTEVQTGGFSKESILPKRNSDKLIA
RKKDWDPKKYGGFDSPTVAYSVLVVAKVEKGKSKK
LKSVKELLGITIMERSSFEKNPIDFLEAKGYKEVK
KDLIIKLPKYSLEELENGRKRMLASAGELQKGNEL
ALPSKYVNELYLASHYEKLKGSPEDNEQKQLFVEQ
HKHYLDEIIEQISEFSKRVILADANLDKVLSAYNK
HRDKPIREQAENIIHLFTLTNLGAPAAFKYFDTTI
DRKRYTSTKEVLDATLIHQSITGLYETRIDLSQLG
GD
(single underline: HNH domain;
double underline: RuvC domain)

[0081] A nuclease-inactivated Cas9 protein may interchangeably be referred to as a “dCas9” protein (for nuclease-“dead” Cas9) or catalytically inactive Cas9. Methods for generating a Cas9 protein (or a fragment thereof) having an inactive DNA cleavage domain are known (See, e.g., Jinek et al., Science. 337:816-821(2012); Qi et al., “Repurposing CRISPR as an RNA-Guided Platform for Sequence-Specific Control of Gene Expression” (2013) Cell. 28; 152(5):1173-83, the entire contents of each of which are incorporated herein by reference). For example, the DNA cleavage domain of Cas9 is known to include two subdomains, the HNH nuclease subdomain and the RuvC1 subdomain. The HNH subdomain cleaves the strand complementary to the gRNA, whereas the RuvC1 subdomain cleaves the non-complementary strand. Mutations within these subdomains can silence the nuclease activity of Cas9. For example, the mutations D10A and H840A completely inactivate the nuclease activity of S. pyogenes Cas9 (Jinek et al., Science. 337:816-821(2012); Qi et al., Cell. 28; 152(5):1173-83 (2013)). In some embodiments, a Cas9 nuclease has an inactive (e.g., an inactivated) DNA cleavage domain, that is, the Cas9 is a nickase, referred to as an “nCas9” protein (for “nickase” Cas9). In some embodiments, proteins comprising fragments of Cas9 are provided. For example, in some embodiments, a protein comprises one of two Cas9 domains: (1) the gRNA binding domain of Cas9; or (2) the DNA cleavage domain of Cas9. In some embodiments, proteins comprising Cas9 or fragments thereof are referred to as “Cas9 variants.” A Cas9 variant shares homology to Cas9, or a fragment thereof. For example, a Cas9 variant is at least about 70% identical, at least about 80% identical, at least about 90% identical, at least about 95% identical, at least about 96% identical, at least about 97% identical, at least about 98% identical, at least about 99% identical, at least about 99.5% identical, or at least about 99.9% identical to wild-type Cas9. In some embodiments, the Cas9 variant may have 1, 2, 3, 4, 5, 6, 7, 8, 9, 10, 11, 12, 13, 14, 15, 16, 17, 18, 19, 20, 21, 22, 21, 24, 25, 26, 27, 28, 29, 30, 31, 32, 33, 34, 35, 36, 37, 38, 39, 40, 41, 42, 43, 44, 45, 46, 47, 48, 49, 50 or more amino acid changes compared to wild-type Cas9. In some embodiments, the Cas9 variant comprises a fragment of Cas9 (e.g., a gRNA binding domain or a DNA-cleavage domain), such that the fragment is at least about 70% identical, at least about 80% identical, at least about 90% identical, at least about 95% identical, at least about 96% identical, at least about 97% identical, at least about 98% identical, at least about 99% identical, at least about 99.5% identical, or at least about 99.9% identical to the corresponding fragment of wild-type Cas9. In some embodiments, the fragment is at least 30%, at least 35%, at least 40%, at least 45%, at least 50%, at least 55%, at least 60%, at least 65%, at least 70%, at least 75%, at least 80%, at least 85%, at least 90%, at least 95% identical, at least 96%, at least 97%, at least 98%, at least 99%, or at least 99.5% of the amino acid length of a corresponding wild-type Cas9.

[0082] In some embodiments, the fragment is at least 100 amino acids in length. In some embodiments, the fragment is at least 100, 150, 200, 250, 300, 350, 400, 450, 500, 550, 600, 650, 700, 750, 800, 850, 900, 950, 1000, 1050, 1100, 1150, 1200, 1250, or at least 1300 amino acids in length.

[0083] In some embodiments, wild-type Cas9 corresponds to Cas9 from Streptococcus pyogenes (NCBI Reference Sequence: NC 017053.1, nucleotide and amino acid sequences as follows).

ATGGATAAGAAATACTCAATAGGCTTAGATATCGG
CACAAATAGCGTCGGATGGGCGGTGATCACTGATG
ATTATAAGGTTCCGTCTAAAAAGTTCAAGGTTCTG
GGAAATACAGACCGCCACAGTATCAAAAAAAATCT
TATAGGGGCTCTTTTATTTGGCAGTGGAGAGACAG
CGGAAGCGACTCGTCTCAAACGGACAGCTCGTAGA
AGGTATACACGTCGGAAGAATCGTATTTGTTATCT
ACAGGAGATTTTTTCAAATGAGATGGCGAAAGTAG
ATGATAGTTTCTTTCATCGACTTGAAGAGTCTTTT
TTGGTGGAAGAAGACAAGAAGCATGAACGTCATCC
TATTTTTGGAAATATAGTAGATGAAGTTGGTTATC
ATGAGAAATATCCAACTATCTATCATCTGCGAAAA
AAATTGGCAGATTCTACTGATAAAGCGGATTTGCG
CTTAATCTATTTGGCCTTAGCGCATATGATTAAGT
TTCGTGGTCATTTTTTGATTGAGGGAGATTTAAAT
CCTGATAATAGTGATGTGGACAAACTATTTATCCA
GTTGGTACAAATCTACAATCAATTATTTGAAGAAA
ACCCTATTAACGCAAGTAGAGTAGATGCTAAAGCG
ATTCTTTCTGCACGATTGAGTAAATCAAGACGATT
AGAAAATCTCATTGCTCAGCTCCCCGGTGAGAAGA
GAAATGGCTTGTTTGGGAATCTCATTGCTTTGTCA
TTGGGATTGACCCCTAATTTTAAATCAAATTTTGA
TTTGGCAGAAGATGCTAAATTACAGCTTTCAAAAG
ATACTTACGATGATGATTTAGATAATTTATTGGCG
CAAATTGGAGATCAATATGCTGATTTGTTTTTGGC
AGCTAAGAATTTATCAGATGCTATTTTACTTTCAG
ATATCCTAAGAGTAAATAGTGAAATAACTAAGGCT
CCCCTATCAGCTTCAATGATTAAGCGCTACGATGA
ACATCATCAAGACTTGACTCTTTTAAAAGCTTTAG
TTCGACAACAACTTCCAGAAAAGTATAAAGAAATC
TTTTTTGATCAATCAAAAAACGGATATGCAGGTTA
TATTGATGGGGGAGCTAGCCAAGAAGAATTTTATA
AATTTATCAAACCAATTTTAGAAAAAATGGATGGT
ACTGAGGAATTATTGGTGAAACTAAATCGTGAAGA
TTTGCTGCGCAAGCAACGGACCTTTGACAACGGCT
CTATTCCCCATCAAATTCACTTGGGTGAGCTGCAT
GCTATTTTGAGAAGACAAGAAGACTTTTATCCATT
TTTAAAAGACAATCGTGAGAAGATTGAAAAAATCT
TGACTTTTCGAATTCCTTATTATGTTGGTCCATTG
GCGCGTGGCAATAGTCGTTTTGCATGGATGACTCG
GAAGTCTGAAGAAACAATTACCCCATGGAATTTTG
AAGAAGTTGTCGATAAAGGTGCTTCAGCTCAATCA
TTTATTGAACGCATGACAAACTTTGATAAAAATCT
TCCAAATGAAAAAGTAGTAGCAAAACATAGTTTGC
TTTATGAGTATTTTACGGTTTATAACGAATTGACA
AAGGTCAAATATGTTACTGAGGGAATGCGAAAACC
AGCATTTCTTTCAGGTGAACAGAAGAAAGCCATTG
TTGATTTACTCTTCAAAACAAATCGAAAAGTAACC
GTTAAGCAATTAAAAGAAGATTATTTCAAAAAAAT
AGAATGTTTTGATAGTGTTGAAATTTCAGGAGTTG
AAGATAGATTTAATGCTTCATTAGGCGCCTACCAT
GATTTGCTAAAAATTATTAAAGATAAAGATTTTTT
GGATAATGAAGAAAATGAAGATATCTTAGAGGATA
TTGTTTTAACATTGACCTTATTTGAAGATAGGGGG
ATGATTGAGGAAAGACTTAAAACATATGCTCACCT
CTTTGATGATAAGGTGATGAAACAGCTTAAACGTC
GCCGTTATACTGGTTGGGGACGTTTGTCTCGAAAA
TTGATTAATGGTATTAGGGATAAGCAATCTGGCAA
AACAATATTAGATTTTTTGAAATCAGATGGTTTTG
CCAATCGCAATTTTATGCAGCTGATCCATGATGAT
AGTTTGACATTTAAAGAAGATATTCAAAAAGCACA
GGTGTCTGGACAAGGCCATAGTTTACATGAACAGA
TTGCTAACTTAGCTGGCAGTCCTGCTATTAAAAAA
GGTATTTTACAGACTGTAAAAATTGTTGATGAACT
GGTCAAAGTAATGGGGCATAAGCCAGAAAATATCG
TTATTGAAATGGCACGTGAAAATCAGACAACTCAA
AAGGGCCAGAAAAATTCGCGAGAGCGTATGAAACG
AATCGAAGAAGGTATCAAAGAATTAGGAAGTCAGA
TTCTTAAAGAGCATCCTGTTGAAAATAGTCAATTG
CAAAATGAAAAGCTCTATCTCTATTATCTACAAAA
TGGAAGAGACATGTATGTGGACCAAGAATTAGATA
TTAATCGTTTAAGTGATTATGATGTCGATCACATT
GTTCCACAAAGTTTCATTAAAGACGATTCAATAGA
CAATAAGGTACTAACGCGTTCTGATAAAAATCGTG
GTAAATCGGATAACGTTCCAAGTGAAGAAGTAGTC
AAAAAGATGAAAAACTATTGGAGACAACTTCTAAA
CGCCAAGTTAATCACTCAACGTAAGTTTGATAATT
TAACGAAAGCTGAACGTGGAGGTTTGAGTGAACTT
GATAAAGCTGGTTTTATCAAACGCCAATTGGTTGA
AACTCGCCAAATCACTAAGCATGTGGCACAAATTT
TGGATAGTCGCATGAATACTAAATACGATGAAAAT
GATAAACTTATTCGAGAGGTTAAAGTGATTAGCTT
AAAATCTAAATTAGTTTCTGACTTCCGAAAAGATT
TCCAATTCTATAAAGTAGGTGAGATTAACAATTAC
CATCATGCCCATGATGCGTATCTAAATGCCGTCGT
TGGAACTGCTTTGATTAAGAAATATCCAAAACTTG
AATCGGAGTTTGTCTATGGTGATTATAAAGTTTAT
GATGTTCGTAAAATGATTGCTAAGTCTGAGCAAGA
AATAGGCAAAGCAACCGCAAAATATTTCTTTTACT
CTAATATCATGAACTTCTTCAAAACAGAAATTACA
CTTGCAAATGGAGAGATTCGCAAACGCCCTCTAAT
CGAAACTAATGGGGAAACTGGAGAAATTGTCTGGG
ATAAAGGGCGAGATTTTGCCACAGTGCGCAAAGTA
TTGTCCATGCCCCAAGTCAATATTGTCAAGAAAAC
AGAAGTACAGACAGGCGGATTCTCCAAGGAGTCAA
TTTTACCAAAAAGAAATTCGGACAAGCTTATTGCT
CGTAAAAAAGACTGGGATCCAAAAAAATATGGTGG
TTTTGATAGTCCAACGGTAGCTTATTCAGTCCTAG
TGGTTGCTAAGGTGGAAAAAGGGAAATCGAAGAAG
TTAAAATCCGTTAAAGAGTTACTAGGGATCACAAT
TATGGAAAGAAGTTCCTTTGAAAAAAATCCGATTG
ACTTTTTAGAAGCTAAAGGATATAAGGAAGTTAAA
AAAGACTTAATCATTAAACTACCTAAATATAGTCT
TTTTGAGTTAGAAAACGGTCGTAAACGGATGCTGG
CTAGTGCCGGAGAATTACAAAAAGGAAATGAGCTG
GCTCTGCCAAGCAAATATGTGAATTTTTTATATTT
AGCTAGTCATTATGAAAAGTTGAAGGGTAGTCCAG
AAGATAACGAACAAAAACAATTGTTTGTGGAGCAG
CATAAGCATTATTTAGATGAGATTATTGAGCAAAT
CAGTGAATTTTCTAAGCGTGTTATTTTAGCAGATG
CCAATTTAGATAAAGTTCTTAGTGCATATAACAAA
CATAGAGACAAACCAATACGTGAACAAGCAGAAAA
TATTATTCATTTATTTACGTTGACGAATCTTGGAG
CTCCCGCTGCTTTTAAATATTTTGATACAACAATT
GATCGTAAACGATATACGTCTACAAAAGAAGTTTT
AGATGCCACTCTTATCCATCAATCCATCACTGGTC
TTTATGAAACACGCATTGATTTGAGTCAGCTAGGA
GGTGACTGA
MDKKYSIGLDIGTNSVGWAVITDDYKVPSKKFKVL
GNTDRHSIKKNLIGALLFGSGETAEATRLKRTARR
RYTRRKNRICYLQEIFSNEMAKVDDSFFHRLEESF
LVEEDKKHERHPIFGNIVDEVAYHEKYPTIYHLRK
KLADSTDKADLRLIYLALAHMIKFRGHFLIEGDLN
PDNSDVDKLFIQLVQIYNQLFEENPINASRVDAKA
ILSARLSKSRRLENLIAQLPGEKRNGLFGNLIALS
LGLTPNFKSNFDLAEDAKLQLSKDTYDDDLDNLLA
QIGDQYADLFLAAKNLSDAILLSDILRVNSEITKA
PLSASMIKRYDEHHQDLTLLKALVRQQLPEKYKEI
FFDQSKNGYAGYIDGGASQEEFYKFIKPILEKMDG
TEELLVKLNREDLLRKQRTFDNGSIPHQIHLGELH
AILRRQEDFYPFLKDNREKIEKILTFRIPYYVGPL
ARGNSRFAWMTRKSEETITPWNFEEVVDKGASAQS
FIERMTNFDKNLPNEKVLPKHSLLYEYFTVYNELT
KVKYVTEGMRKPAFLSGEQKKAIVDLLFKTNRKVT
VKQLKEDYFKKIECFDSVEISGVEDRFNASLGAYH
DLLKIIKDKDFLDNEENEDILEDIVLTLTLFEDRG
MIEERLKTYAHLFDDKVMKQLKRRRYTGWGRLSRK
LINGIRDKQSGKTILDFLKSDGFANRNFMQLIHDD
SLTFKEDIQKAQVSGQGHSLHEQIANLAGSPAIKK
GILQTVKIVDELVKVMGHKPENIVIEMARENQTTQ
KGQKNSRERMKRIEEGIKELGSQILKEHPVENTQL
QNEKLYLYYLQNGRDMYVDQELDINRLSDYDVDHI
VPQSFIKDDSIDNKVLTRSDKNRGKSDNVPSEEVV
KKMKNYWRQLLNAKLITQRKFDNLTKAERGGLSEL
DKAGFIKRQLVETRQITKHVAQILDSRMNTKYDEN
DKLIREVKVITLKSKLVSDFRKDFQFYKVREINNY
HHAHDAYLNAVVGTALIKKYPKLESEFVYGDYKVY
DVRKMIAKSEQEIGKATAKYFFYSNIMNFFKTEIT
LANGEIRKRPLIETNGETGEIVWDKGRDFATVRKV
LSMPQVNIVKKTEVQTGGFSKESILPKRNSDKLIA
RKKDWDPKKYGGFDSPTVAYSVLVVAKVEKGKSKK
LKSVKELLGITIMERSSFEKNPIDFLEAKGYKEVK
KDLIIKLPKYSLEELENGRKRMLASAGELQKGNEL
ALPSKYVNELYLASHYEKLKGSPEDNEQKQLEVEQ
HKHYLDEIIEQISEFSKRVILADANLDKVLSAYNK
HRDKPIREQAENIIHLFTLTNLGAPAAFKYFDTTI
DRKRYTSTKEVLDATLIHQSITGLYETRIDLSQLG
GD
(single underline: HNH domain;
double underline: RuvC domain)

[0084] In some embodiments, wild-type Cas9 corresponds to, or comprises the following nucleotide and/or amino acid sequences:

ATGGATAAAAAGTATTCTATTGGTTTAGACATCGG
CACTAATTCCGTTGGATGGGCTGTCATAACCGATG
AATACAAAGTACCTTCAAAGAAATTTAAGGTGTTG
GGGAACACAGACCGTCATTCGATTAAAAAGAATCT
TATCGGTGCCCTCCTATTCGATAGTGGCGAAACGG
CAGAGGCGACTCGCCTGAAACGAACCGCTCGGAGA
AGGTATACACGTCGCAAGAACCGAATATGTTACTT
ACAAGAAATTTTTAGCAATGAGATGGCCAAAGTTG
ACGATTCTTTCTTTCACCGTTTGGAAGAGTCCTTC
CTTGTCGAAGAGGACAAGAAACATGAACGGCACCC
CATCTTTGGAAACATAGTAGATGAGGTGGCATATC
ATGAAAAGTACCCAACGATTTATCACCTCAGAAAA
AAGCTAGTTGACTCAACTGATAAAGCGGACCTGAG
GTTAATCTACTTGGCTCTTGCCCATATGATAAAGT
TCCGTGGGCACTTTCTCATTGAGGGTGATCTAAAT
CCGGACAACTCGGATGTCGACAAACTGTTCATCCA
GTTAGTACAAACCTATAATCAGTTGTTTGAAGAGA
ACCCTATAAATGCAAGTGGCGTGGATGCGAAGGCT
ATTCTTAGCGCCCGCCTCTCTAAATCCCGACGGCT
AGAAAACCTGATCGCACAATTACCCGGAGAGAAGA
AAAATGGGTTGTTCGGTAACCTTATAGCGCTCTCA
CTAGGCCTGACACCAAATTTTAAGTCGAACTTCGA
CTTAGCTGAAGATGCCAAATTGCAGCTTAGTAAGG
ACACGTACGATGACGATCTCGACAATCTACTGGCA
CAAATTGGAGATCAGTATGCGGACTTATTTTTGGC
TGCCAAAAACCTTAGCGATGCAATCCTCCTATCTG
ACATACTGAGAGTTAATACTGAGATTACCAAGGCG
CCGTTATCCGCTTCAATGATCAAAAGGTACGATGA
ACATCACCAAGACTTGACACTTCTCAAGGCCCTAG
TCCGTCAGCAACTGCCTGAGAAATATAAGGAAATA
TTCTTTGATCAGTCGAAAAACGGGTACGCAGGTTA
TATTGACGGCGGAGCGAGTCAAGAGGAATTCTACA
AGTTTATCAAACCCATATTAGAGAAGATGGATGGG
ACGGAAGAGTTGCTTGTAAAACTCAATCGCGAAGA
TCTACTGCGAAAGCAGCGGACTTTCGACAACGGTA
GCATTCCACATCAAATCCACTTAGGCGAATTGCAT
GCTATACTTAGAAGGCAGGAGGATTTTTATCCGTT
CCTCAAAGACAATCGTGAAAAGATTGAGAAAATCC
TAACCTTTCGCATACCTTACTATGTGGGACCCCTG
GCCCGAGGGAACTCTCGGTTCGCATGGATGACAAG
AAAGTCCGAAGAAACGATTACTCCATGGAATTTTG
AGGAAGTTGTCGATAAAGGTGCGTCAGCTCAATCG
TTCATCGAGAGGATGACCAACTTTGACAAGAATTT
ACCGAACGAAAAAGTATTGCCTAAGCACAGTTTAC
TTTACGAGTATTTCACAGTGTACAATGAACTCACG
AAAGTTAAGTATGTCACTGAGGGCATGCGTAAACC
CGCCTTTCTAAGCGGAGAACAGAAGAAAGCAATAG
TAGATCTGTTATTCAAGACCAACCGCAAAGTGACA
GTTAAGCAATTGAAAGAGGACTACTTTAAGAAAAT
TGAATGCTTCGATTCTGTCGAGATCTCCGGGGTAG
AAGATCGATTTAATGCGTCACTTGGTACGTATCAT
GACCTCCTAAAGATAATTAAAGATAAGGACTTCCT
GGATAACGAAGAGAATGAAGATATCTTAGAAGATA
TAGTGTTGACTCTTACCCTCTTTGAAGATCGGGAA
ATGATTGAGGAAAGACTAAAAACATACGCTCACCT
GTTCGACGATAAGGTTATGAAACAGTTAAAGAGGC
GTCGCTATACGGGCTGGGGACGATTGTCGCGGAAA
CTTATCAACGGGATAAGAGACAAGCAAAGTGGTAA
AACTATTCTCGATTTTCTAAAGAGCGACGGCTTCG
CCAATAGGAACTTTATGCAGCTGATCCATGATGAC
TCTTTAACCTTCAAAGAGGATATACAAAAGGCACA
GGTTTCCGGACAAGGGGACTCATTGCACGAACATA
TTGCGAATCTTGCTGGTTCGCCAGCCATCAAAAAG
GGCATACTCCAGACAGTCAAAGTAGTGGATGAGCT
AGTTAAGGTCATGGGACGTCACAAACCGGAAAACA
TTGTAATCGAGATGGCACGCGAAAATCAAACGACT
CAGAAGGGGCAAAAAAACAGTCGAGAGCGGATGAA
GAGAATAGAAGAGGGTATTAAAGAACTGGGCAGCC
AGATCTTAAAGGAGCATCCTGTGGAAAATACCCAA
TTGCAGAACGAGAAACTTTACCTCTATTACCTACA
AAATGGAAGGGACATGTATGTTGATCAGGAACTGG
ACATAAACCGTTTATCTGATTACGACGTCGATCAC
ATTGTACCCCAATCCTTTTTGAAGGACGATTCAAT
CGACAATAAAGTGCTTACACGCTCGGATAAGAACC
GAGGGAAAAGTGACAATGTTCCAAGCGAGGAAGTC
GTAAAGAAAATGAAGAACTATTGGCGGCAGCTCCT
AAATGCGAAACTGATAACGCAAAGAAAGTTCGATA
ACTTAACTAAAGCTGAGAGGGGTGGCTTGTCTGAA
CTTGACAAGGCCGGATTTATTAAACGTCAGCTCGT
GGAAACCCGCCAAATCACAAAGCATGTTGCACAGA
TACTAGATTCCCGAATGAATACGAAATACGACGAG
AACGATAAGCTGATTCGGGAAGTCAAAGTAATCAC
TTTAAAGTCAAAATTGGTGTCGGACTTCAGAAAGG
ATTTTCAATTCTATAAAGTTAGGGAGATAAATAAC
TACCACCATGCGCACGACGCTTATCTTAATGCCGT
CGTAGGGACCGCACTCATTAAGAAATACCCGAAGC
TAGAAAGTGAGTTTGTGTATGGTGATTAGAAAGTT
TATGACGTCCGTAAGATGATCGCGAAAAGCGAACA
GGAGATAGGCAAGGCTACAGCCAAATACTTCTTTT
ATTCTAACATTATGAATTTCTTTAAGACGGAAATC
ACTCTGGCAAACGGAGAGATACGCAAACGACCTTT
AATTGAAACCAATGGGGAGACAGGTGAAATCGTAT
GGGATAAGGGCCGGGACTTCGCGACGGTGAGAAAA
GTTTTGTCCATGCCCCAAGTCAACATAGTAAAGAA
AACTGAGGTGCAGACCGGAGGGTTTTCAAAGGAAT
CGATTCTTCCAAAAAGGAATAGTGATAAGCTCATC
GCTCGTAAAAAGGACTGGGACCCGAAAAAGTACGG
TGGCTTCGATAGCCCTACAGTTGCCTATTCTGTCC
TAGTAGTGGCAAAAGTTGAGAAGGGAAAATCCAAG
AAACTGAAGTCAGTCAAAGAATTATTGGGGATAAC
GATTATGGAGCGCTCGTCTTTTGAAAAGAACCCCA
TCGACTTCCTTGAGGCGAAAGGTTACAAGGAAGTA
AAAAAGGATCTCATAATTAAACTACCAAAGTATAG
TCTGTTTGAGTTAGAAAATGGCCGAAAACGGATGT
TGGCTAGCGCCGGAGAGCTTCAAAAGGGGAACGAA
CTCGCACTACCGTCTAAATACGTGAATTTCCTGTA
TTTAGCGTCCCATTACGAGAAGTTGAAAGGTTCAC
CTGAAGATAACGAACAGAAGCAACTTTTTGTTGAG
CAGCACAAACATTATCTCGACGAAATCATAGAGCA
AATTTCGGAATTCAGTAAGAGAGTCATCCTAGCTG
ATGCCAATCTGGACAAAGTATTAAGCGCATACAAC
AAGCACAGGGATAAACCCATACGTGAGCAGGCGGA
AAATATTATCCATTTGTTTACTCTTACCAACCTCG
GCGCTCCAGCCGCATTCAAGTATTTTGACACAACG
ATAGATCGCAAACGATACACTTCTACCAAGGAGGT
GCTAGACGCGACACTGATTCACCAATCCATCACGG
GATTATATGAAACTCGGATAGATTTGTCACAGCTT
GGGGGTGACGGATCCCCCAAGAAGAAGAGGAAAGT
CTCGAGCGACTACAAAGACCATGACGGTGATTATA
AAGATCATGACATCGATTACAAGGATGAGGATGAC
AAGGCTGCAGGA
MDKKYSIGLAIGTNSVGWAVITDEYKVPSKKFKVL
GNTDRHSIKKNLIGALLFDSGETAEATRLKRTARR
RYTRRKNRICYLQEIFSNEMAKVDDSFFHRLEESF
LVEEDKKHERHPIFGNIVDEVAYHEKYPTIYHLRK
KLVDSTDKADLRLIYLALAHMIKFRGHFLIEGDLN
PDNSDVDKLFIQLVQTYNQLFEENPINASGVDAKA
ILSARLSKSRRLENLIAQLPGEKKNGLFGNLIALS
LGLTPNFKSNFDLAEDAKLQLSKDTYDDDLDNLLA
QIGDQYADLFLAAKNLSDAILLSDILRVNTEITKA
PLSASMIKRYDEHHQDLTLLKALVRQQLPEKYKEI
FFDQSKNGYAGYIDGGASQEEFYKFIKPILEKMDG
TEELLVKLNREDLLRKQRTFDNGSIPHQIHLGELH
AILRRQEDFYPFLKDNREKIEKILTFRIPYYVGPL
ARGNSRFAWMTRKSEETITPWNFEEVVDKGASAQS
FIERMTNFDKNLPNEKVLPKHSLLYEYFTVYNELT
KVKYVTEGMRKPAFLSGEQKKAIVDLLFKTNRKVT
VKQLKEDYFKKIECFDSVEISGVEDRFNASLGTYH
DLLKIIKDKDFLDNEENEDILEDIVLTLTLFEDRE
MIEERLKTYAHLFDDKVMKQLKRRRYTGWGRLSRK
LINGIRDKQSGKTILDFLKSDGFANRNFMQLIHDD
SLTFKEDIQKAQVSGQGDSLHEHIANLAGSPAIKK
GILQTVKVVDELVKVMGRHKPENIVIEMARENQTT
QKGQKNSRERMKRIEEGIKELGSQILKEHPVENTQ
LQNEKLYLYYLQNGRDMYVDQELDINRLSDYDVDH
IVPQSFLKDDSIDNKVLTRSDKNRGKSDNVPSEEV
VKKMKNYWRQLLNAKLITQRKFDNLTKAERGGLSE
LDKAGFIKRQLVETRQITKHVAQILDSRMNTKYDE
NDKLIREVKVITLKSKLVSDFRKDFQFYKVREINN
YHHAHDAYLNAVVGTALIKKYPKLESEFVYGDYKV
YDVRKMIAKSEQEIGKATAKYFFYSNIMNFFKTEI
TLANGEIRKRPLIETNGETGEIVWDKGRDFATVRK
VLSMPQVNIVKKTEVQTGGFSKESILPKRNSDKLI
ARKKDWDPKKYGGFDSPTVAYSVLVVAKVEKGKSK
KLKSVKELLGITIMERSSFEKNPIDFLEAKGYKEV
KKDLIIKLPKYSLFELENGRKRMLASAGELQKGNE
LALPSKYVNFLYLASHYEKLKGSPEDNEQKQLFVE
QHKHYLDEIIEQISEFSKRVILADANLDKVLSAYN
KHRDKPIREQAENIIHLFTLTNLGAPAAFKYFDTT
IDRKRYTSTKEVLDATLIHQSITGLYETRIDLSQL
GGD
(single underline: HNH domain;
double underline: RuvC domain)

[0085] In some embodiments, wild-type Cas9 corresponds to Cas9 from Streptococcus pyogenes (NCBI Reference Sequence: NC 002737.2 (nucleotide sequence as follows); and Uniprot Reference Sequence: Q99ZW2 (amino acid sequence as follows).

ATGGATAAGAAATACTCAATAGGCTTAGATATCGG
CACAAATAGCGTCGGATGGGCGGTGATCACTGATG
AATATAAGGTTCCGTCTAAAAAGTTCAAGGTTCTG
GGAAATACAGACCGCCACAGTATCAAAAAAAATCT
TATAGGGGCTCTTTTATTTGACAGTGGAGAGACAG
CGGAAGCGACTCGTCTCAAACGGACAGCTCGTAGA
AGGTATACACGTCGGAAGAATCGTATTTGTTATCT
ACAGGAGATTTTTTCAAATGAGATGGCGAAAGTAG
ATGATAGTTTCTTTCATCGACTTGAAGAGTCTTTT
TTGGTGGAAGAAGACAAGAAGCATGAACGTCATCC
TATTTTTGGAAATATAGTAGATGAAGTTGGTTATC
ATGAGAAATATCCAACTATCTATCATCTGCGAAAA
AAATTGGTAGATTCTACTGATAAAGCGGATTTGCG
CTTAATCTATTTGGCCTTAGCGCATATGATTAAGT
TTCGTGGTCATTTTTTGATTGAGGGAGATTTAAAT
CCTGATAATAGTGATGTGGACAAACTATTTATCCA
GTTGGTACAAACCTACAATCAATTATTTGAAGAAA
ACCCTATTAACGCAAGTGGAGTAGATGCTAAAGCG
ATTCTTTCTGCACGATTGAGTAAATCAAGACGATT
AGAAAATCTCATTGCTCAGCTCCCCGGTGAGAAGA
AAAATGGCTTATTTGGGAATCTCATTGCTTTGTCA
TTGGGTTTGACCCCTAATTTTAAATCAAATTTTGA
TTTGGCAGAAGATGCTAAATTACAGCTTTCAAAAG
ATACTTAGGATGATGATTTAGATAATTTATTGGCG
CAAATTGGAGATCAATATGCTGATTTGTTTTTGGC
AGCTAAGAATTTATCAGATGCTATTTTACTTTCAG
ATATCCTAAGAGTAAATACTGAAATAACTAAGGCT
CCCCTATCAGCTTCAATGATTAAACGCTACGATGA
ACATCATCAAGACTTGACTCTTTTAAAAGCTTTAG
TTCGACAACAACTTCCAGAAAAGTATAAAGAAATC
TTTTTTGATCAATCAAAAAACGGATATGCAGGTTA
TATTGATGGGGGAGCTAGCCAAGAAGAATTTTATA
AATTTATCAAACCAATTTTAGAAAAAATGGATGGT
ACTGAGGAATTATTGGTGAAACTAAATCGTGAAGA
TTTGCTGCGCAAGCAACGGACCTTTGACAACGGCT
CTATTCCCCATCAAATTCACTTGGGTGAGCTGCAT
GCTATTTTGAGAAGACAAGAAGACTTTTATCCATT
TTTAAAAGACAATCGTGAGAAGATTGAAAAAATCT
TGACTTTTCGAATTCCTTATTATGTTGGTCCATTG
GCGCGTGGCAATAGTCGTTTTGCATGGATGACTCG
GAAGTCTGAAGAAACAATTACCCCATGGAATTTTG
AAGAAGTTGTCGATAAAGGTGCTTCAGCTCAATCA
TTTATTGAACGCATGACAAACTTTGATAAAAATCT
TCCAAATGAAAAAGTACTACCAAAACATAGTTTGC
TTTATGAGTATTTTACGGTTTATAACGAATTGACA
AAGGTCAAATATGTTACTGAAGGAATGCGAAAACC
AGCATTTCTTTCAGGTGAACAGAAGAAAGCCATTG
TTGATTTACTCTTCAAAACAAATCGAAAAGTAACC
GTTAAGCAATTAAAAGAAGATTATTTCAAAAAAAT
AGAATGTTTTGATAGTGTTGAAATTTCAGGAGTTG
AAGATAGATTTAATGCTTCATTAGGTACCTACCAT
GATTTGCTAAAAATTATTAAAGATAAAGATTTTTT
GGATAATGAAGAAAATGAAGATATCTTAGAGGATA
TTGTTTTAACATTGACCTTATTTGAAGATAGGGAG
ATGATTGAGGAAAGACTTAAAACATATGCTCACCT
CTTTGATGATAAGGTGATGAAACAGCTTAAACGTC
GCCGTTATACTGGTTGGGGACGTTTGTCTCGAAAA
TTGATTAATGGTATTAGGGATAAGCAATCTGGCAA
AACAATATTAGATTTTTTGAAATCAGATGGTTTTG
CCAATCGCAATTTTATGCAGCTGATCCATGATGAT
AGTTTGACATTTAAAGAAGACATTCAAAAAGCACA
AGTGTCTGGACAAGGCGATAGTTTACATGAACATA
TTGCAAATTTAGCTGGTAGCCCTGCTATTAAAAAA
GGTATTTTACAGACTGTAAAAGTTGTTGATGAATT
GGTCAAAGTAATGGGGCGGCATAAGCCAGAAAATA
TCGTTATTGAAATGGCACGTGAAAATCAGACAACT
CAAAAGGGCCAGAAAAATTCGCGAGAGCGTATGAA
ACGAATCGAAGAAGGTATCAAAGAATTAGGAAGTC
AGATTCTTAAAGAGCATCCTGTTGAAAATACTCAA
TTGCAAAATGAAAAGCTCTATCTCTATTATCTCCA
AAATGGAAGAGACATGTATGTGGACCAAGAATTAG
ATATTAATCGTTTAAGTGATTATGATGTCGATCAC
ATTGTTCCACAAAGTTTCCTTAAAGAGGATTCAAT
AGACAATAAGGTCTTAACGCGTTCTGATAAAAATC
GTGGTAAATCGGATAACGTTCCAAGTGAAGAAGTA
GTCAAAAAGATGAAAAACTATTGGAGACAACTTCT
AAACGCCAAGTTAATCACTCAACGTAAGTTTGATA
ATTTAACGAAAGCTGAACGTGGAGGTTTGAGTGAA
CTTGATAAAGCTGGTTTTATCAAACGCCAATTGGT
TGAAACTCGCCAAATCACTAAGCATGTGGCACAAA
TTTTGGATAGTCGCATGAATACTAAATACGATGAA
AATGATAAACTTATTCGAGAGGTTAAAGTGATTAC
CTTAAAATCTAAATTAGTTTCTGACTTCCGAAAAG
ATTTCCAATTCTATAAAGTACGTGAGATTAACAAT
TACCATCATGCCCATGATGCGTATCTAAATGCCGT
CGTTGGAACTGCTTTGATTAAGAAATATCCAAAAC
TTGAATCGGAGTTTGTCTATGGTGATTATAAAGTT
TATGATGTTCGTAAAATGATTGCTAAGTCTGAGCA
AGAAATAGGCAAAGCAACCGCAAAATATTTCTTTT
AGTCTAATATCATGAACTTCTTCAAAACAGAAATT
ACACTTGCAAATGGAGAGATTCGCAAACGCCCTCT
AATCGAAACTAATGGGGAAACTGGAGAAATTGTCT
GGGATAAAGGGCGAGATTTTGCCACAGTGCGCAAA
GTATTGTCCATGCCCCAAGTCAATATTGTCAAGAA
AACAGAAGTACAGACAGGCGGATTCTCCAAGGAGT
CAATTTTACCAAAAAGAAATTCGGACAAGCTTATT
GCTCGTAAAAAAGACTGGGATCCAAAAAAATATGG
TGGTTTTGATAGTCCAACGGTAGCTTATTCAGTCC
TAGTGGTTGCTAAGGTGGAAAAAGGGAAATCGAAG
AAGTTAAAATCCGTTAAAGAGTTACTAGGGATCAC
AATTATGGAAAGAAGTTCCTTTGAAAAAAATCCGA
TTGACTTTTTAGAAGCTAAAGGATATAAGGAAGTT
AAAAAAGACTTAATCATTAAACTACCTAAATATAG
TCTTTTTGAGTTAGAAAACGGTCGTAAACGGATGC
TGGCTAGTGCCGGAGAATTACAAAAAGGAAATGAG
CTGGCTCTGCCAAGCAAATATGTGAATTTTTTATA
TTTAGCTAGTCATTATGAAAAGTTGAAGGGTAGTC
CAGAAGATAACGAACAAAAACAATTGTTTGTGGAG
CAGCATAAGCATTATTTAGATGAGATTATTGAGCA
AATCAGTGAATTTTCTAAGCGTGTTATTTTAGCAG
ATGCCAATTTAGATAAAGTTCTTAGTGCATATAAC
AAACATAGAGACAAACCAATACGTGAAGAAGCAGA
AAATATTATTCATTTATTTACGTTGACGAATCTTG
GAGCTCCCGCTGCTTTTAAATATTTTGATACAACA
ATTGATCGTAAACGATATACGTCTACAAAAGAAGT
TTTAGATGCCACTCTTATCCATCAATCCATCACTG
GTCTTTATGAAACACGCATTGATTTGAGTCAGCTA
GGAGGTGACTGA
MDKKYSIGLDIGTNSVGWAVITDEYKVPSKKFKVL
GNTDRHSIKKNLIGALLFDSGETAEATRLKRTARR
RYTRRKNRICYLQEIFSNEMAKVDDSFFHRLEESF
LVEEDKKHERHPIFGNIVDEVAYHEKYPTIYHLRK
KLVDSTDKADLRLIYLALAHMIKFRGHFLIEGDLN
PDNSDVDKLFIQLVQTYNQLFEENPINASGVDAKA
ILSARLSKSRRLENLIAQLPGEKKNGLFGNLIALS
LGLTPNFKSNFDLAEDAKLQLSKDTYDDDLDNLLA
QIGDQYADLFLAAKNLSDAILLSDILRVNTEITKA
PLSASMIKRYDEHHQDLTLLKALVRQQLPEKYKEI
EFDQSKNGYAGYIDGGASQEEEYKFIKPILEKMDG
TEELLVKLNREDLLRKQRTFDNGSIPHQIHLGELH
AILRRQEDFYPFLKDNREKIEKILTFRIPYYVGPL
ARGNSRFAWMTRKSEETITPWNFEEVVDKGASAQS
FIERMTNFDKNLPNEKVLPKHSLLYEYFTVYNELT
KVKYVTEGMRKPAFLSGEQKKAIVDLLFKTNRKVT
VKQLKEDYFKKIECFDSVEISGVEDRFNASLGTYH
DLLKIIKDKDFLDNEENEDILEDIVLTLTLFEDRE
MIEERLKTYAHLFDDKVMKQLKRRRYTGWGRLSRK
LINGIRDKQSGKTILDFLKSDGFANRNFMQLIHDD
SLTFKEDIQKAQVSGQGDSLHEHIANLAGSPAIKK
GILQTVKVVDELVKVMGRHKPENIVIEMARENQTT
QKGQKNSRERMKRIEEGIKELGSQILKEHPVENTQ
LQNEKLYLYYLQNGRDMYVDQELDINRLSDYDVDH
IVPQSFLKDDSIDNKVLTRSDKNRGKSDNVPSEEV
VKKMKNYWRQLLNAKLITQRKFDNLTKAERGGLSE
LDKAGFIKRQLVETRQITKHVAQILDSRMNTKYDE
NDKLIREVKVITLKSKLVSDFRKDFQFYKVREINN
YHHAHDAYLNAVVGTALIKKYPKLESEFVYGDYKV
YDVRKMIAKSEQEIGKATAKYFFYSNIMNFFKTEI
TLANGEIRKRPLIETNGETGEIVWDKGRDFATVRK
VLSMPQVNIVKKTEVQTGGFSKESILPKRNSDKLI
ARKKDWDPKKYGGFDSPTVAYSVLVVAKVEKGKSK
KLKSVKELLGITIMERSSFEKNPIDFLEAKGYKEV
KKDLIIKLPKYSLFELENGRKRMLASAGELQKGNE
LALPSKYVNFLYLASHYEKLKGSPEDNEQKQLFVE
QHKHYLDEIIEQISEFSKRVILADANLDKVLSAYN
KHRDKPIREQAENIIHLFTLTNLGAPAAFKYFDTT
IDRKRYTSTKEVLDATLIHQSITGLYETRIDLSQL
GGD (single underline: HNH domain;
double underline: RuvC domain)

[0086] In some embodiments, Cas9 refers to Cas9 from: Corynebacterium ulcerans (NCBI Refs: NC_015683.1, NC_017317.1); Corynebacterium diphtheria (NCBI Refs: NC_016782.1, NC_016786.1); Spiroplasma syrphidicola (NCBI Ref: NC_021284.1); Prevotella intermedia (NCBI Ref: NC_017861.1); Spiroplasma taiwanense (NCBI Ref: NC_021846.1); Streptococcus iniae (NCBI Ref: NC_021314.1); Belliella baltica (NCBI Ref: NC_018010.1); Psychroflexus torquisI (NCBI Ref: NC_018721.1); Streptococcus thermophilus (NCBI Ref: YP_820832.1), Listeria innocua (NCBI Ref: NP_472073.1), Campylobacter jejuni (NCBI Ref: YP_002344900.1) or Neisseria meningitidis (NCBI Ref: YP_002342100.1) or to a Cas9 from any other organism.

[0087] In some embodiments, the Cas9 is from Neisseria meningitidis (Nme). In some embodiments, the Cas9 is Nme1, Nme2 or Nme3. In some embodiments, the PAM-interacting domains for Nme1, Nme2 or Nme3 are N₄GAT, N₄CC, and N₄CAAA, respectively (see e.g., Edraki, A., et al., A Compact, High-Accuracy Cas9 with a Dinucleotide PAM for In Vivo Genome Editing, Molecular Cell (2018)). An exemplary Neisseria meningitidis Cas9 protein, NmelCas9, (NCBI Reference: WP_002235162.1; type II CRISPR RNA-guided endonuclease Cas9) has the following amino acid sequence:

```
      1 maafkpnpin yilgidigia svgwamveid
          edenpiclid lgvrvferae vpktgdslam
    61 arrlarsvrr itrrrahrll rarrllkreg
          vlqaadfden glikslpntp wqlraaaldr
  121 kltplewsav llhlikhrgy lsqrkneget
          adkelgallk gvadnahalq tgdfrtpael
  181 alnkfekesg hirnqrgdys htfsrkdlqa
          elillfekqk efgnphvsgg ikegietllm
  241 tqrpalsgda vqkmlghctf epaepkaakn
          tytaerfiwl tklnnlrile qgserpltdt
  301 eratlmdepy rkskltyaqa rkllgledta
          ffkglrygkd naeastlmem kayhaisral
  361 ekeglkdkks plnlspelqd eigtafsifk
          tdeditgrlk driqpeilea llkhisfdkf
  421 vqislkalrr ivplmeqgkr ydeacaeiyg
          dhygkkntee kiylppipad eirnpvvlra
  481 lsqarkving vvrrygspar ihietarevg
          ksfkdrkeie krqeenrkdr ekaaakfrey
  541 fpnfvgepks kdilklrlye qqhgkclysg
          keinlgrlne kgyveidhal pfsrtwddsf
  601 nnkvlvlgse nqnkgnqtpy eyfngkdnsr
          ewqefkarve tsrfprskkq rillqkfded
  661 gfkernlndt ryvnrficqf vadrmritgk
          gkkrvfasng qitnllrgfw glrkvraend
  721 rhhaldavvv acstvamqqk itrfvrykem
          nafdgktidk etgevlhqkt hfpqpweffa
  781 qevmirvfgk pdgkpefeea dtpeklrtll
          aeklssrpea vheyvtplfv srapnrkmsg
  841 qghmetvksa krldegvsvl rvpltqlklk
          dlekmvnrer epklyealka rleahkddpa
  901 kafaepfyky dkagnrtqqv kavrveqvqk
          tgvwvrnhng iadnatmvrv dvfekgdkyy
  961 ivpiyswqva kgilpdravv qgkdeedwql
          iddsfnfkfs ihpndlvevi tkkarmfgyf
1021 aschrgtgni nirihdldhk igkngilegi
          gvktalsfqk yqidelgkei rpcrlkkrpp
1081 vr
```

[0088] Another exemplary Neisseria meningitidis Cas9 protein, Nme2Cas9, (NCBI Reference: WP_002230835; type II CRISPR RNA-guided endonuclease Cas9) has the following amino acid sequence:

```
      1 maafkpnpin yilgidigia svgwamveid
          eeenpirlid lgvrvferae vpktgdslam
    61 arrlarsvrr ltrrrahrll rarrllkreg
          vlqaadfden glikslpntp wqlraaaldr
  121 kltplewsav llhlikhrgy lsqrkneget
          adkelgallk gvannahalq tgdfrtpael
  181 alnkfekesg hirnqrgdys htfsrkdlqa
          elillfekqk efgnphvsgg ikegietllm
  241 tqrpalsgda vqkmlghctf epaepkaakn
          tytaerfiwl tklnnlrile qgserpltdt
  301 eratlmdepy rkskltyaqa rkllgledta
          ffkglrygkd naeastimem kayhaisral
  361 ekeglkdkks plnlsselqd eigtafsifk
          tdeditgrlk drvqpeilea llkhisfdkf
  421 vqislkalrr ivplmeqgkr ydeacaeiyg
          dhygkkntee kiylppipad eirnpvvlra
  481 lsqarkving vvrrygspar ihietarevg
          ksfkdrkeie krqeenrkdr ekaaakfrey
  541 fpnfvgepks kdilklrlye qqhgkclysg
          keinlvrlne kgyveidhal pfsrtwddsf
  601 nnkvlvlgse nqnkgnqtpy eyfngkdnsr
          ewqefkarve tsrfprskkq rillqkfded
  661 gfkecnlndt ryvnrficqf vadhilltgk
          gkrrvfasng qitnllrgfw glrkvraend
  721 rhhaldavvv acstvamqqk itrfvrykem
          nafdgktidk etgkvlhqkt hfpqpweffa
  781 qevmirvfgk pdgkpefeea dtpeklrtll
          aeklssrpea vheyvtplfv srapnrkmsg
  841 ahkdtlrsak rfvkhnekis vkrvwlteik
          ladlenmvny kngreielye alkarleayg
  901 gnakqafdpk dnpfykkggq lvkavrvekt
          qesgvllnkk naytiadngd mvrvdvfckv
  961 dkkgknqyfi vpiyawqvae nilpdidckg
          yriddsytfc fslhkydlia fqkdekskve
1021 fayyincdss ngrfylawhd kgskeqqfri
          stqnlvliqk yqvnelgkei rpcrlkkrpp
1081 vr
```

[0089] In some embodiments, dCas9 corresponds to, or comprises in part or in whole, a Cas9 amino acid sequence having one or more mutations that inactivate the Cas9 nuclease activity. For example, in some embodiments, a dCas9 domain comprises D10A and an H840A mutation or corresponding mutations in another Cas9. In some embodiments, the dCas9 comprises the amino acid sequence of dCas9 (D10A and H840A):

MDKKYSIGLAIGTNSVGWAVITDEYKVPSKKFKVLG
NTDRHSIKKNLIGALLFDSGETAEATRLKRTARRR
YTRRKNRICYLQEIFSNEMAKVDDSFFHRLEESFL
VEEDKKHERHPIFGNIVDEVAYHEKYPTIYHLRKK
LVDSTDKADLRLIYLALAHMIKFRGHFLIEGDLNP
DNSDVDKLFIQLVQTYNQLFEENPINASGVDAKAI
LSARLSKSRRLENLIAQLPGEKKNGLFGNLIALSL
GLTPNFKSNFDLAEDAKLQLSKDTYDDDLDNLLAQ
IGDQYADLFLAAKNLSDAILLSDILRVNTEITKAP
LSASMIKRYDEHHQDLTLLKALVRQQLPEKYKEIF
FDQSKNGYAGYIDGGASQEEFYKFIKPILEKMDGT
EELLVKLNREDLLRKQRTFDNGSIPHQIHLGELHA
ILRRQEDFYPFLKDNREKIEKILTFRIPYYVGPLA
RGNSRFAWMTRKSEETITPWNFEEVVDKGASAQSF
IERMTNFDKNLPNEKVLPKHSLLYEYFTVYNELTK
VKYVTEGMRKPAFLSGEQKKAIVDLLFKTNRKVTV
KQLKEDYFKKIECFDSVEISGVEDRFNASLGTYHD
LLKIIKDKDFLDNEENEDILEDIVLTLTLFEDREM
IEERLKTYAHLFDDKVMKQLKRRRYTGWGRLSRKL
INGIRDKQSGKTILDFLKSDGFANRNFMQLIHDDS
LTFKEDIQKAQVSGQGDSLHEHIANLAGSPAIKKG
ILQTVKVVDELVKVMGRHKPENIVIEMARENQTTQ
KGQKNSRERMKRIEEGIKELGSQILKEHPVENTQL
QNEKLYLYYLQNGRDMYVDQELDINRLSDYDVDAI
VPQSFLKDDSIDNKVLTRSDKNRGKSDNVPSEEVV
KKMKNYWRQLLNAKLITQRKFDNLTKAERGGLSEL
DKAGFIKRQLVETRQITKHVAQILDSRMNTKYDEN
DKLIREVKVITLKSKLVSDFRKDFQFYKVREINNY
HHAHDAYLNAVVGTALIKKYPKLESEFVYGDYKVY
DVRKMIAKSEQEIGKATAKYFFYSNIMNFFKTEIT
LANGEIRKRPLIETNGETGEIVWDKGRDFATVRKV
LSMPQVNIVKKTEVQTGGFSKESILPKRNSDKLIA
RKKDWDPKKYGGFDSPTVAYSVLVVAKVEKGKSKK
LKSVKELLGITIMERSSFEKNPIDFLEAKGYKEVK
KDLIIKLPKYSLFELENGRKRMLASAGELQKGNEL
ALPSKYVNFLYLASHYEKLKGSPEDNEQKQLFVEQ
HKHYLDEIIEQISEFSKRVILADANLDKVLSAYNK
HRDKPIREQAENIIHLFTLTNLGAPAAFKYFDTTI
DRKRYTSTKEVLDATLIHQSITGLYETRIDLSQLG
GD
(single underline: HNH domain;
double underline: RuvC domain).

[0090] In some embodiments, the Cas9 domain comprises a D10A mutation, while the residue at position 840 remains a histidine in the amino acid sequence provided above, or at corresponding positions in any of the amino acid sequences provided herein.

[0091] In other embodiments, dCas9 variants having mutations other than D10A and H840A are provided, which, e.g., result in nuclease inactivated Cas9 (dCas9). Such mutations, by way of example, include other amino acid substitutions at D10 and H840, or other substitutions within the nuclease domains of Cas9 (e.g., substitutions in the HNH nuclease subdomain and/or the RuvC1 subdomain). In some embodiments, variants or homologues of dCas9 are provided which are at least about 70% identical, at least about 80% identical, at least about 90% identical, at least about 95% identical, at least about 98% identical, at least about 99% identical, at least about 99.5% identical, or at least about 99.9% identical. In some embodiments, variants of dCas9 are provided having amino acid sequences which are shorter, or longer, by about 5 amino acids, by about 10 amino acids, by about 15 amino acids, by about 20 amino acids, by about 25 amino acids, by about 30 amino acids, by about 40 amino acids, by about 50 amino acids, by about 75 amino acids, by about 100 amino acids or more.

[0092] In some embodiments, Cas9 fusion proteins as provided herein comprise the full-length amino acid sequence of a Cas9 protein, e.g., one of the Cas9 sequences provided herein. In other embodiments, however, fusion proteins as provided herein do not comprise a full-length Cas9 sequence, but only one or more fragments thereof. Exemplary amino acid sequences of suitable Cas9 domains and Cas9 fragments are provided herein, and additional suitable sequences of Cas9 domains and fragments will be apparent to those of skill in the art.

[0093] It should be appreciated that additional Cas9 proteins (e.g., a nuclease dead Cas9 (dCas9), a Cas9 nickase (nCas9), or a nuclease active Cas9), including variants and homologs thereof, are within the scope of this disclosure. Exemplary Cas9 proteins include, without limitation, those provided below. In some embodiments, the Cas9 protein is a nuclease dead Cas9 (dCas9). In some embodiments, the Cas9 protein is a Cas9 nickase (nCas9). In some embodiments, the Cas9 protein is a nuclease active Cas9.

[0094] Exemplary catalytically inactive Cas9 (dCas9):

DKKYSIGLAIGTNSVGWAVITDEYKVPSKKFKVLGN
TDRHSIKKNLIGALLFDSGETAEATRLKRTARRRY
TRRKNRICYLQEIFSNEMAKVDDSFFHRLEESFLV
EEDKKHERHPIFGNIVDEVAYHEKYPTIYHLRKKL
VDSTDKADLRLIYLALAHMIKFRGHFLIEGDLNPD
NSDVDKLFIQLVQTYNQLFEENPINASGVDAKAIL
SARLSKSRRLENLIAQLPGEKKNGLFGNLIALSLG
LTPNFKSNFDLAEDAKLQLSKDTYDDDLDNLLAQI
GDQYADLFLAAKNLSDAILLSDILRVNTEITKAPL
SASMIKRYDEHHQDLTLLKALVRQQLPEKYKEIFF
DQSKNGYAGYIDGGASQEEFYKFIKPILEKMDGTE
ELLVKLNREDLLRKQRTFDNGSIPHQIHLGELHAI
LRRQEDFYPFLKDNREKIEKILTFRIPYYVGPLAR
GNSRFAWMTRKSEETITPWNFEEVVDKGASAQSFI
ERMTNFDKNLPNEKVLPKHSLLYEYFTVYNELTKV
KYVTEGMRKPAFLSGEQKKAIVDLLFKTNRKVTVK
QLKEDYFKKIECFDSVEISGVEDRFNASLGTYHDL
LKIIKDKDFLDNEENEDILEDIVLTLTLFEDREMI
EERLKTYAHLFDDKVMKQLKRRRYTGWGRLSRKLI
NGIRDKQSGKTILDFLKSDGFANRNEMQLIHDDSL
TFKEDIQKAQVSGQGDSLHEHIANLAGSPAIKKGI
LQTVKVVDELVKVMGRHKPENIVIEMARENQTTQK
GQKNSRERMKRIEEGIKELGSQILKEHPVENTQLQ
NEKLYLYYLQNGRDMYVDQELDINRLSDYDVDAIV
PQSFLKDDSIDNKVLTRSDKNRGKSDNVPSEEVVK
KMKNYWRQLLNAKLITQRKFDNLTKAERGGLSELD
KAGFIKRQLVETRQITKHVAQILDSRMNTKYDEND
KLIREVKVITLKSKLVSDFRKDFQFYKVREINNYH
HAHDAYLNAVVGTALIKKYPKLESEFVYGDYKVYD
VRKMIAKSEQEIGKATAKYFFYSNIMNFFKTEITL
ANGEIRKRPLIETNGETGEIVWDKGRDFATVRKVL
SMPQVNIVKKTEVQTGGFSKESILPKRNSDKLIAR
KKDWDPKKYGGFDSPTVAYSVLVVAKVEKGKSKKL
KSVKELLGITIMERSSFEKNPIDFLEAKGYKEVKK
DLIIKLPKYSLEELENGRKRMLASAGELQKGNELA
LPSKYVNELYLASHYEKLKGSPEDNEQKQLFVEQH
KHYLDEIIEQISEFSKRVILADANLDKVLSAYNKH
RDKPIREQAENIIHLFTLTNLGAPAAFKYFDTTID
RKRYTSTKEVLDATLIHQSITGLYETRIDLSQLGG
D

[0095] Exemplary catalytically Cas9 nickase (nCas9):

DKKYSIGLAIGTNSVGWAVITDEYKVPSKKFKVLG
NTDRHSIKKNLIGALLFDSGETAEATRLKRTARRR
YTRRKNRICYLQEIFSNEMAKVDDSFFHRLEESFL
VEEDKKHERHPIFGNIVDEVAYHEKYPTIYHLRKK
LVDSTDKADLRLIYLALAHMIKFRGHFLIEGDLNP
DNSDVDKLFIQLVQTYNQLFEENPINASGVDAKAI
LSARLSKSRRLENLIAQLPGEKKNGLFGNLIALSL
GLTPNFKSNFDLAEDAKLQLSKDTYDDDLDNLLAQ
IGDQYADLFLAAKNLSDAILLSDILRVNTEITKAP
LSASMIKRYDEHHQDLTLLKALVRQQLPEKYKEIF
FDQSKNGYAGYIDGGASQEEFYKFIKPILEKMDGT
EELLVKLNREDLLRKQRTFDNGSIPHQIHLGELHA
ILRRQEDFYPFLKDNREKIEKILTFRIPYYVGPLA
RGNSRFAWMTRKSEETITPWNFEEVVDKGASAQSF
IERMTNFDKNLPNEKVLPKHSLLYEYFTVYNELTK
VKYVTEGMRKPAFLSGEQKKAIVDLLFKTNRKVTV
KQLKEDYFKKIECFDSVEISGVEDRFNASLGTYHD
LLKIIKDKDFLDNEENEDILEDIVLTLTLFEDREM
IEERLKTYAHLFDDKVMKQLKRRRYTGWGRLSRKL
INGIRDKQSGKTILDFLKSDGFANRNFMQLIHDDS
LTFKEDIQKAQVSGQGDSLHEHIANLAGSPAIKKG
ILQTVKVVDELVKVMGRHKPENIVIEMARENQTTQ
KGQKNSRERMKRIEEGIKELGSQILKEHPVENTQL
QNEKLYLYYLQNGRDMYVDQELDINRLSDYDVDHI
VPQSFLKDDSIDNKVLTRSDKNRGKSDNVPSEEVV
KKMKNYWRQLLNAKLITQRKFDNLTKAERGGLSEL
DKAGFIKRQLVETRQITKHVAQILDSRMNTKYDEN
DKLIREVKVITLKSKLVSDFRKDFQFYKVREINNY
HHAHDAYLNAVVGTALIKKYPKLESEFVYGDYKVY
DVRKMIAKSEQEIGKATAKYFFYSNIMNFFKTEIT
LANGEIRKRPLIETNGETGEIVWDKGRDFATVRKV
LSMPQVNIVKKTEVQTGGFSKESILPKRNSDKLIA
RKKDWDPKKYGGFDSPTVAYSVLVVAKVEKGKSKK
LKSVKELLGITIMERSSFEKNPIDFLEAKGYKEVK
KDLIIKLPKYSLEELENGRKRMLASAGELQKGNEL
ALPSKYVNELYLASHYEKLKGSPEDNEQKQLFVEQ
HKHYLDEIIEQISEFSKRVILADANLDKVLSAYNK
HRDKPIREQAENIIHLFTLTNLGAPAAFKYFDTTI
DRKRYTSTKEVLDATLIHQSITGLYETRIDLSQLG
GD

[0096] Exemplary catalytically active Cas9:

DKKYSIGLDIGTNSVGWAVITDEYKVPSKKFKVLG
NTDRHSIKKNLIGALLFDSGETAEATRLKRTARRR
YTRRKNRICYLQEIFSNEMAKVDDSFFHRLEESFL
VEEDKKHERHPIFGNIVDEVAYHEKYPTIYHLRKK
LVDSTDKADLRLIYLALAHMIKFRGHFLIEGDLNP
DNSDVDKLFIQLVQTYNQLFEENPINASGVDAKAI
LSARLSKSRRLENLIAQLPGEKKNGLFGNLIALSL
GLTPNFKSNFDLAEDAKLQLSKDTYDDDLDNLLAQ
IGDQYADLFLAAKNLSDAILLSDILRVNTEITKAP
LSASMIKRYDEHHQDLTLLKALVRQQLPEKYKEIF
FDQSKNGYAGYIDGGASQEEFYKFIKPILEKMDGT
EELLVKLNREDLLRKQRTFDNGSIPHQIHLGELHA
ILRRQEDFYPFLKDNREKIEKILTFRIPYYVGPLA
RGNSRFAWMTRKSEETITPWNFEEVVDKGASAQSF
IERMTNFDKNLPNEKVLPKHSLLYEYFTVYNELTK
VKYVTEGMRKPAFLSGEQKKAIVDLLFKTNRKVTV
KQLKEDYFKKIECFDSVEISGVEDRFNASLGTYHD
LLKIIKDKDFLDNEENEDILEDIVLTLTLFEDREM
IEERLKTYAHLFDDKVMKQLKRRRYTGWGRLSRKL
INGIRDKQSGKTILDFLKSDGFANRNFMQLIHDDS
LTFKEDIQKAQVSGQGDSLHEHIANLAGSPAIKKG
ILQTVKVVDELVKVMGRHKPENIVIEMARENQTTQ
KGQKNSRERMKRIEEGIKELGSQILKEHPVENTQL
QNEKLYLYYLQNGRDMYVDQELDINRLSDYDVDHI
VPQSFLKDDSIDNKVLTRSDKNRGKSDNVPSEEVV
KKMKNYWRQLLNAKLITQRKFDNLTKAERGGLSEL
DKAGFIKRQLVETRQITKHVAQILDSRMNTKYDEN
DKLIREVKVITLKSKLVSDFRKDFQFYKVREINNY
HHAHDAYLNAVVGTALIKKYPKLESEFVYGDYKVY
DVRKMIAKSEQEIGKATAKYFFYSNIMNFFKTEIT
LANGEIRKRPLIETNGETGEIVWDKGRDFATVRKV
LSMPQVNIVKKTEVQTGGFSKESILPKRNSDKLIA
RKKDWDPKKYGGFDSPTVAYSVLVVAKVEKGKSKK
LKSVKELLGITIMERSSFEKNPIDFLEAKGYKEVK
KDLIIKLPKYSLEELENGRKRMLASAGELQKGNEL
ALPSKYVNELYLASHYEKLKGSPEDNEQKQLFVEQ
HKHYLDEIIEQISEFSKRVILADANLDKVLSAYNK
HRDKPIREQAENIIHLFTLTNLGAPAAFKYFDTTI
DRKRYTSTKEVLDATLIHQSITGLYETRIDLSQLG
GD.

[0097] In some embodiments, Cas9 refers to a Cas9 from archaea (e.g. nanoarchaea), which constitute a domain and kingdom of single-celled prokaryotic microbes. In some embodiments, Cas9 refers to CasX or CasY, which have been described in, for example, Burstein et al., “New CRISPR-Cas systems from uncultivated microbes.” Cell Res. 2017 Feb. 21. doi: 10.1038/cr.2017.21, the entire contents of which is hereby incorporated by reference. Using genome-resolved metagenomics, a number of CRISPR-Cas systems were identified, including the first reported Cas9 in the archaeal domain of life. This divergent Cas9 protein was found in little-studied nanoarchaea as part of an active CRISPR-Cas system. In bacteria, two previously unknown systems were discovered, CRISPR-CasX and CRISPR-CasY, which are among the most compact systems yet discovered. In some embodiments, Cas9 refers to CasX, or a variant of CasX. In some embodiments, Cas9 refers to a CasY, or a variant of CasY. It should be appreciated that other RNA-guided DNA binding proteins may be used as a nucleic acid programmable DNA binding protein (napDNAbp), and are within the scope of this disclosure.

[0098] In particular embodiments, napDNAbps useful in the methods of the disclosure include circular permutants, which are known in the art and described, for example, by Oakes et al., Cell 176, 254-267, 2019. An exemplary circular permutant follows where the bold sequence indicates sequence derived from Cas9, the italics sequence denotes a linker sequence, and the underlined sequence denotes a bipartite nuclear localization sequence.

[0099] CP5 (with MSP “NGC=Pam Variant with mutations Regular Cas9 likes NGG” PID=Protein Interacting Domain and “D10A” nickase):

EIGKATAKYFFYSNIMNFFKTEITLANGEIRKRPL
IETNGETGEIVWDKGRDFATVRKVLSMPQVNIVKK
TEVQTGGFSKESILPKRNSDKLIARKKDWDPKKYG
GFMQPTVAYSVLVVAKVEKGKSKKLKSVKELLGIT
IMERSSFEKNPIDFLEAKGYKEVKKDLIIKLPKYS
LFELENGRKRMLASAKFLQKGNELALPSKYVNFLY
LASHYEKLKGSPEDNEQKQLFVEQHKHYLDEIIEQ
ISEFSKRVILADANLDKVLSAYNKHRDKPIREQAE
NIIHLFTLTNLGAPRAFKYFDTTIARKEYRSTKEV
LDATLIHQSITGLYETRIDLSQLGGDGGSGGSGGS
GGSGGSGGSGGMDKKYSIGLAIGTNSVGWAVITDE
YKVPSKKFKVLGNTDRHSIKKNLIGALLFDSGETA
EATRLKRTARRRYTRRKNRICYLQEIFSNEMAKVD
DSFFHRLEESFLVEEDKKHERHPIFGNIVDEVAYH
EKYPTIYHLRKKLVDSTDKADLRLIYLALAHMIKF
RGHFLIEGDLNPDNSDVDKLFIQLVQTYNQLFEEN
PINASGVDAKAILSARLSKSRRLENLIAQLPGEKK
NGLFGNLIALSLGLTPNFKSNFDLAEDAKLQLSKD
TYDDDLDNLLAQIGDQYADLFLAAKNLSDAILLSD
ILRVNTEITKAPLSASMIKRYDEHHQDLTLLKALV
RQQLPEKYKEIFFDQSKNGYAGYIDGGASQEEFYK
FIKPILEKMDGTEELLVKLNREDLLRKQRTFDNGS
IPHQIHLGELHAILRRQEDFYPFLKDNREKIEKIL
TFRIPYYVGPLARGNSRFAWMTRKSEETITPWNFE
EVVDKGASAQSFIERMTNFDKNLPNEKVLPKHSLL
YEYFTVYNELTKVKYVTEGMRKPAFLSGEQKKAIV
DLLFKTNRKVTVKQLKEDYFKKIECFDSVEISGVE
DRFNASLGTYHDLLKIIKDKDFLDNEENEDILEDI
VLTLTLFEDREMIEERLKTYAHLFDDKVMKQLKRR
RYTGWGRLSRKLINGIRDKQSGKTILDFLKSDGFA
NRNFMQLIHDDSLTFKEDIQKAQVSGQGDSLHEHI
ANLAGSPAIKKGILQTVKVVDELVKVMGRHKPENI
VIEMARENQTTQKGQKNSRERMKRIEEGIKELGSQ
ILKEHPVENTQLQNEKLYLYYLQNGRDMYVDQELD
INRLSDYDVDHIVPQSFLKDDSIDNKVLTRSDKNR
GKSDNVPSEEVVKKMKNYWRQLLNAKLITQRKFDN
LTKAERGGLSELDKAGFIKRQLVETRQITKHVAQI
LDSRMNTKYDENDKLIREVKVITLKSKLVSDFRKD
FQFYKVREINNYHHAHDAYLNAVVGTALIKKYPKL
ESEFVYGDYKVYDVRKMIAKSEQEGADKRTADGSE
FESPKKKRKV*

[0100] Non-limiting examples of a polynucleotide programmable nucleotide binding domain which can be incorporated into a base editor include a CRISPR protein-derived domain, a restriction nuclease, a meganuclease, TAL nuclease (TALEN), and a zinc finger nuclease (ZFN).

[0101] In some embodiments, the nucleic acid programmable DNA binding protein (napDNAbp) of any of the fusion proteins provided herein may be a CasX or CasY protein. In some embodiments, the napDNAbp is a CasX protein. In some embodiments, the napDNAbp is a CasY protein. In some embodiments, the napDNAbp comprises an amino acid sequence that is at least 85%, at least 90%, at least 91%, at least 92%, at least 93%, at least 94%, at least 95%, at least 96%, at least 97%, at least 98%, at least 99%, or at ease 99.5% identical to a naturally-occurring CasX or CasY protein. In some embodiments, the napDNAbp is a naturally-occurring CasX or CasY protein. In some embodiments, the napDNAbp comprises an amino acid sequence that is at least 85%, at least 90%, at least 91%, at least 92%, at least 93%, at least 94%, at least 95%, at least 96%, at least 97%, at least 98%, at least 99%, or at ease 99.5% identical to any CasX or CasY protein described herein. It should be appreciated that Cas12b/C2c1, CasX and CasY from other bacterial species may also be used in accordance with the present disclosure.

Cas12b/C2c1 (uniprot.org/uniprot/T0D7A2#2)
Sp|TOD7A2|C2C1_ALIAG CRISPR-associated
endo-nuclease C2c1
OS = Alicyclobacillus acido-terrestris
(strain ATCC 49025/DSM 3922/CIP 106132/NCIMB
13137/GD3B) GN = c2cl PE = 1 SV = 1
MAVKSIKVKLRLDDMPEIRAGLWKLHKEVNAGVRY
YTEWLSLLRQENLYRRSPNGDGEQECDKTAEECKA
ELLERLRARQVENGHRGPAGSDDELLQLARQLYEL
LVPQAIGAKGDAQQIARKFLSPLADKDAVGGLGIA
KAGNKPRWVRMREAGEPGWEEEKEKAETRKSADRT
ADVLRALADFGLKPLMRVYTDSEMSSVEWKPLRKG
QAVRTWDRDMFQQAIERMMSWESWNQRVGQEYAKL
VEQKNRFEQKNFVGQEHLVHLVNQLQQDMKEASPG
LESKEQTAHYVTGRALRGSDKVFEKWGKLAPDAPF
DLYDAEIKNVQRRNTRRFGSHDLFAKLAEPEYQAL
WREDASFLTRYAVYNSILRKLNHAKMFATFTLPDA
TAHPIWTRFDKLGGNLHQYTFLFNEFGERRHAIRF
HKLLKVENGVAREVDDVTVPISMSEQLDNLLPRDP
NEPIALYFRDYGAEQHFTGEFGGAKIQCRRDQLAH
MHRRRGARDVYLNVSVRVQSQSEARGERRPPYAAV
FRLVGDNHRAFVHFDKLSDYLAEHPDDGKLGSEGL
LSGLRVMSVDLGLRTSASISVFRVARKDELKPNSK
GRVPFFFPIKGNDNLVAVHERSQLLKLPGETESKD
LRAIREERQRTLRQLRTQLAYLRLLVRCGSEDVGR
RERSWAKLIEQPVDAANHMTPDWREAFENELQKLK
SLHGICSDKEWMDAVYESVRRVWRHMGKQVRDWRK
DVRSGERPKIRGYAKDVVGGNSIEQIEYLERQYKF
LKSWSFFGKVSGQVIRAEKGSRFAITLREHIDHAK
EDRLKKLADRIIMEALGYVYALDERGKGKWVAKYP
PCQLILLEELSEYQFNNDRPPSENNQLMQWSHRGV
FQELINQAQVHDLLVGTMYAAFSSRFDARTGAPGI
RCRRVPARCTQEHNPEPFPWWLNKFVVEHTLDACP
LRADDLIPTGEGEIFVSPFSAEEGDFHQIHADLNA
AQNLQQRLWSDFDISQIRLRCDWGEVDGELVLIPR
LTGKRTADSYSNKVFYTNTGVTYYERERGKKRRKV
FAQEKLSEEEAELLVEADEAREKSVVLMRDPSGII
NRGNWTRQKEFWSMV NQRIEGYLVKQIRSRVPLQ
DSACENTGDI
CasX (uniprot.org/uniprot/F0NN87;
uniprot.org/uniprot/F0NH53)
>tr|FONN87|FONN87_SULIH
CRISPR-associated Casx protein
OS = Sulfolobus islandicus
(strain HVE10/4)
GN = SiH_0402 PE = 4 SV = 1
MEVPLYNIFGDNYIIQVATEAENSTIYNNKVEIDD
EELRNVLNLAYKIAKNNEDAAAERRGKAKKKKGEE
GETTTSNIILPLSGNDKNPWTETLKCYNFPTTVAL
SEVFKNFSQVKECEEVSAPSFVKPEFYKFGRSPGM
VERTRRVKLEVEPHYLIMAAAGWVLTRLGKAKVSE
GDYVGVNVFTPTRGILYSLIQNVNGIVPGIKPETA
FGLWIARKVVSSVTNPNVSVVRIYTISDAVGQNPT
TINGGFSIDLTKLLEKRYLLSERLEAIARNALSIS
SNMRERYIVLANYIYEYLTG SKRLEDLLYFANRD
LIMNLNSDDGKVRDLKLISAYVNGELIRGEG
>tr|FONH53|FONH53_SULIR
CRISPR associated protein,
Casx OS = Sulfolobus islandicus
(strain REY15A)
GN = SiRe_0771 PE = 4 SV = 1
MEVPLYNIFGDNYIIQVATEAENSTIYNNKVEIDD
EELRNVLNLAYKIAKNNEDAAAERRGKAKKKKGEE
GETTTSNIILPLSGNDKNPWTETLKCYNFPTTVAL
SEVFKNFSQVKECEEVSAPSFVKPEFYKFGRSPGM
VERTRRVKLEVEPHYLIMAAAGWVLTRLGKAKVSE
GDYVGVNVFTPTRGILYSLIQNVNGIVPGIKPETA
FGLWIARKVVSSVTNPNVSVVRIYTISDAVGQNPT
TINGGFSIDLTKLLEKRDLLSERLEAIARNALSIS
SNMRERYIVLANYIYEYLTG SKRLEDLLYFANRD
LIMNLNSDDGKVRDLKLISAY
VNGELIRGEG
Deltaproteobacteria CasX
MEKRINKIRKKLSADNATKPVSRSGPMKTLLVRVM
TDDLKKRLEKRRKKPEVMPQVISNNAANNLRMLLD
DYTKMKEAILQVYWQEFKDDHVGLMCKFAQPASKK
IDQNKLKPEMDEKGNLTTAGFACSQCGQPLFVYKL
EQVSEKGKAYTNYFGRCNVAEHEKLILLAQLKPVK
DSDEAVTYSLGKFGQRALDFYSIHVTKESTHPVKP
LAQIAGNRYASGPVGKALSDACMGTIASFLSKYQD
IIIEHQKVVKGNQKRLESLRELAGKENLEYPSVTL
PPQPHTKEGVDAYNEVIARVRMWVNLNLWQKLKLS
RDDAKPLLRLKGFPSFPVVERRENEVDWWNTINEV
KKLIDAKRDMGRVFWSGVTAEKRNTILEGYNYLPN
ENDHKKREGSLENPKKPAKRQFGDLLLYLEKKYAG
DWGKVFDEAWERIDKKIAGLTSHIEREEARNAEDA
QSKAVLTDWLRAKASFVLERLKEMDEKEFYACEIQ
LQKWYGDLRGNPFAVEAENRVVDISGFSIGSDGHS
IQYRNLLAWKYLENGKREFYLLMNYGKKGRIRFTD
GTDIKKSGKWQGLLYGGGKAKVIDLTFDPDDEQLI
ILPLAFGTRQGREFIWNDLLSLETGLIKLANGRVI
EKTIYNKKIGRDEPALFVALTFERREVVDPSNIKP
VNLIGVARGENIPAVIALTDPEGCPLPEFKDSSGG
PTDILRIGEGYKEKQRAIQAAKEVEQRRAGGYSRK
FASKSRNLADDMVRNSARDLFYHAVTHDAVLVFAN
LSRGFGRQGKRTFMTERQYTKMEDWLTAKLAYEGL
TSKTYLSKTLAQYTSKTCSNCGFTITYADMDVMLV
RLKKTSDGWATTLNNKELKAEYQITYYNRYKRQTV
EKELSAELDRLSEESGNNDISKWTKGRRDEALFLL
KKRFSHRPVQEQFVCLDCGHEVHAAEQAALNIARS
WLFLNSNSTEFKSYKSGKQPFVGAWQAFYKRRLKE
VWKPNA
CasY (ncbi.nlm.nih.gov/protein/APG80656.1)
>APG80656.1 CRISPR-associated protein CasY
(uncultured Parcubacteria group bacterium)
MSKRHPRISGVKGYRLHAQRLEYTGKSGAMRTIKY
PLYSSPSGGRTVPREIVSAINDDYVGLYGLSNFDD
LYNAEKRNEEKVYSVLDFWYDCVQYGAVFSYTAPG
LLKNVAEVRGGSYELTKTLKGSHLYDELQIDKVIK
FLNKKEISRANGSLDKLKKDIIDCFKAEYRERHKD
QCNKLADDIKNAKKDAGASLGERQKKLFRDFFGIS
EQSENDKPSFTNPLNLTCCLLPFDTVNNNRNRGEV
LFNKLKEYAQKLDKNEGSLEMWEYIGIGNSGTAFS
NFLGEGFLGRLRENKITELKKAMMDITDAWRGQEQ
EEELEKRLRILAALTIKLREPKFDNHWGGYRSDIN
GKLSSWLQNYINQTVKIKEDLKGHKKDLKKAKEMI
NRFGESDTKEEAVVSSLLESIEKIVPDDSADDEKP
DIPAIAIYRRFLSDGRLTLNRFVQREDVQEALIKE
RLEAEKKKKPKKRKKKSDAEDEKETIDFKELFPHL
AKPLKLVPNFYGDSKRELYKKYKNAAIYTDALWKA
VEKIYKSAFSSSLKNSFFDTDFDKDFFIKRLQKIF
SVYRRFNTDKWKPIVKNSFAPYCDIVSLAENEVLY
KPKQSRSRKSAAIDKNRVRLPSTENIAKAGIALAR
ELSVAGFDWKDLLKKEEHEEYIDLIELHKTALALL
LAVTETQLDISALDFVENGTVKDFMKTRDGNLVLE
GRFLEMFSQSIVFSELRGLAGLMSRKEFITRSAIQ
TMNGKQAELLYIPHEFQSAKITTPKEMSRAFLDLA
PAEFATSLEPESLSEKSLLKLKQMRYYPHYFGYEL
TRTGQGIDGGVAENALRLEKSPVKKREIKCKQYKT
LGRGQNKIVLYVRSSYYQTQFLEWFLHRPKNVQTD
VAVSGSFLIDEKKVKTRWNYDALTVALEPVSGSER
VFVSQPFTIFPEKSAEEEGQRYLGIDIGEYGIAYT
ALEITGDSAKILDQNFISDPQLKTLREEVKGLKLD
QRRGTFAMPSTKIARIRESLVHSLRNRIHHLALKH
KAKIVYELEVSRFEEGKQKIKKVYATLKKADVYSE
IDADKNLQTTVWGKLAVASEISASYTSQFCGACKK
LWRAEMQVDETITTQELIGTVRVIKGGTLIDAIKD
FMRPPIFDENDTPFPKYRDFCDKHHISKKMRGNSC
LFICPFCRANADADIQASQTIALLRYVKEEKKVED
YFERFRKLKNIKVLGQMKKI

[0102] The term “Cas12” or “Cas12 domain” refers to an RNA guided nuclease comprising a Cas12 protein or a fragment thereof (e.g., a protein comprising an active, inactive, or partially active DNA cleavage domain of Cas12, and/or the gRNA binding domain of Cas12). Cas12 belongs to the class 2, Type V CRISPR/Cas system. A Cas12 nuclease is also referred to sometimes as a CRISPR (clustered regularly interspaced short palindromic repeat) associated nuclease. The sequence of an exemplary Bacillus hisashii Cas 12b (BhCas12b) Cas 12 domain is provided below:

MAPKKKRKVGIHGVPAAATRSFILKIEPNEEVKKG
LWKTHEVLNHGIAYYMNILKLIRQEAIYEHHEQDP
KNPKKVSKAEIQAELWDFVLKMQKCNSFTHEVDKD
EVFNILRELYEELVPSSVEKKGEANQLSNKFLYPL
VDPNSQSGKGTASSGRKPRWYNLKIAGDPSWEEEK
KKWEEDKKKDPLAKILGKLAEYGLIPLFIPYTDSN
EPIVKEIKWMEKSRNQSVRRLDKDMFIQALERFLS
WESWNLKVKEEYEKVEKEYKTLEERIKEDIQALKA
LEQYEKERQEQLLRDTLNTNEYRLSKRGLRGWREI
IQKWLKMDENEPSEKYLEVFKDYQRKHPREAGDYS
VYEFLSKKENHFIWRNHPEYPYLYATFCEIDKKKK
DAKQQATFTLADPINHPLWVRFEERSGSNLNKYRI
LTEQLHTEKLKKKLTVQLDRLIYPTESGGWEEKGK
VDIVLLPSRQFYNQIFLDIEEKGKHAFTYKDESIK
FPLKGTLGGARVQFDRDHLRRYPHKVESGNVGRIY
FNMTVNIEPTESPVSKSLKIHRDDFPKVVNFKPKE
LTEWIKDSKGKKLKSGIESLEIGLRVMSIDLGQRQ
AAAASIFEVVDQKPDIEGKLFFPIKGTELYAVHRA
SFNIKLPGETLVKSREVLRKAREDNLKLMNQKLNF
LRNVLHFQQFEDITEREKRVTKWISRQENSDVPLV
YQDELIQIRELMYKPYKDWVAFLKQLHKRLEVEIG
KEVKHWRKSLSDGRKGLYGISLKNIDEIDRTRKFL
LRWSLRPTEPGEVRRLEPGQRFAIDQLNHLNALKE
DRLKKMANTIIMHALGYCYDVRKKKWQAKNPACQI
ILFEDLSNYNPYEERSRFENSKLMKWSRREIPRQV
ALQGEIYGLQVGEVGAQFSSRFHAKTGSPGIRCSV
VTKEKLQDNRFFKNLQREGRLTLDKIAVLKEGDLY
PDKGGEKFISLSKDRKCVTTHADINAAQNLQKRFW
TRTHGFYKVYCKAYQVDGQTVYIPESKDQKQKIIE
EFGEGYFILKDGVYEWVNAGKLKIKKGSSKQSSSE
LVDSDILKDSFDLASELKGEKLMLYRDPSGNVFPS
DKWMAAGVFFGKLERILISKLTNQYSISTIEDDSS
KQSMKRPAATKKAGQAKKKK.

[0103] Amino acid sequences having at least 85% or greater identity to the BhCas12b amino acid sequence are also useful in the methods of the disclosure.

[0104] The term “conservative amino acid substitution” or “conservative mutation” refers to the replacement of one amino acid by another amino acid with a common property. A functional way to define common properties between individual amino acids is to analyze the normalized frequencies of amino acid changes between corresponding proteins of homologous organisms (Schulz, G. E. and Schirmer, R. H., Principles of Protein Structure, Springer-Verlag, New York (1979)). According to such analyses, groups of amino acids can be defined where amino acids within a group exchange preferentially with each other, and therefore resemble each other most in their impact on the overall protein structure (Schulz, G. E. and Schirmer, R. H., supra). Non-limiting examples of conservative mutations include amino acid substitutions of amino acids, for example, lysine for arginine and vice versa such that a positive charge can be maintained; glutamic acid for aspartic acid and vice versa such that a negative charge can be maintained; serine for threonine such that a free —OH can be maintained; and glutamine for asparagine such that a free —NH2 can be maintained.

[0105] The term “coding sequence” or “protein coding sequence” as used interchangeably herein refers to a segment of a polynucleotide that codes for a protein. The region or sequence is bounded nearer the 5′ end by a start codon and nearer the 3′ end with a stop codon. Coding sequences can also be referred to as open reading frames.

[0106] The term “deaminase” or “deaminase domain,” as used herein, refers to a protein or enzyme that catalyzes a deamination reaction. In some embodiments, the deaminase is an adenosine deaminase, which catalyzes the hydrolytic deamination of adenine to hypoxanthine. In some embodiments, the deaminase is an adenosine deaminase, which catalyzes the hydrolytic deamination of adenosine or adenine (A) to inosine (I). In some embodiments, the deaminase or deaminase domain is an adenosine deaminase, catalyzing the hydrolytic deamination of adenosine or deoxyadenosine to inosine or deoxyinosine, respectively. In some embodiments, the adenosine deaminase catalyzes the hydrolytic deamination of adenosine in deoxyribonucleic acid (DNA). The adenosine deaminases (e.g., engineered adenosine deaminases, evolved adenosine deaminases) provided herein can be from any organism, such as a bacterium. In some embodiments, the adenosine deaminase is from a bacterium, such as E. coli, S. aureus, S. typhi, S. putrefaciens, H. influenzae, or C. crescentus.

[0107] In some embodiments, the adenosine deaminase is a TadA deaminase. In some embodiments, the TadA deaminase is TadA*7.10 variant. In some embodiments, the TadA*7.10 variant is a TadA*8. In some embodiments, the TadA*8 is TadA*8.1, TadA*8.2, TadA*8.3, TadA*8.4, TadA*8.5, TadA*8.6, TadA*8.7, TadA*8.8, TadA*8.9, TadA*8.10, TadA*8.11, TadA*8.12, TadA*8.13, TadA*8.14, TadA*8.15, TadA*8.16, TadA*8.17, TadA*8.18, TadA*8.19, TadA*8.20, TadA*8.21, TadA*8.22, TadA*8.23, or TadA*8.24. In some embodiments, the deaminase or deaminase domain is a variant of a naturally occurring deaminase from an organism, such as a human, chimpanzee, gorilla, monkey, cow, dog, rat, or mouse. In some embodiments, the deaminase or deaminase domain does not occur in nature. For example, in some embodiments, the deaminase or deaminase domain is at least 50%, at least 55%, at least 60%, at least 65%, at least 70%, at least 75% at least 80%, at least 85%, at least 90%, at least 91%, at least 92%, at least 93%, at least 94%, at least 95%, at least 96%, at least 97%, at least 98%, at least 99%, at least 99.1%, at least 99.2%, at least 99.3%, at least 99.4%, at least 99.5%, at least 99.6%, at least 99.7%, at least 99.8%, or at least 99.9% identical to a naturally occurring deaminase. For example, deaminase domains are described in International PCT Application Nos. PCT/2017/045381 (WO 2018/027078) and PCT/US2016/058344 (WO 2017/070632), each of which is incorporated herein by reference for its entirety. Also see Komor, A. C., et al., “Programmable editing of a target base in genomic DNA without double-stranded DNA cleavage” Nature 533, 420-424 (2016); Gaudelli, N. M., et al., “Programmable base editing of A⋅T to G⋅C in genomic DNA without DNA cleavage” Nature 551, 464-471 (2017); Komor, A. C., et al., “Improved base excision repair inhibition and bacteriophage Mu Gam protein yields C:G-to-T:A base editors with higher efficiency and product purity” Science Advances 3:eaao4774 (2017)), and Rees, H. A., et al., “Base editing: precision chemistry on the genome and transcriptome of living cells.” Nat Rev Genet. 2018 December; 19(12):770-788. doi: 10.1038/s41576-018-0059-1, the entire contents of which are hereby incorporated by reference.

[0108] By “detectable label” is meant a composition that when linked to a molecule of interest renders the latter detectable, via spectroscopic, photochemical, biochemical, immunochemical, or chemical means. For example, useful labels include radioactive isotopes, magnetic beads, metallic beads, colloidal particles, fluorescent dyes, electron-dense reagents, enzymes (for example, as commonly used in an enzyme-linked immunosorbent assay (ELISA)), biotin, digoxigenin, or haptens.

[0109] By “disease” is meant any condition or disorder that damages or interferes with the normal function of a cell, tissue, or organ. An example of a disease includes Rett Syndrome.

[0110] The term “effective amount,” as used herein, refers to an amount of a biologically active agent that is sufficient to elicit a biological response. In some embodiments, an effect amount is an amount required to ameliorate the symptoms of a disease relative to an untreated patient. The effective amount of active agent(s) used in the practice of the methods and uses described herein for therapeutic treatment of a disease varies depending upon the manner of administration, the age, body weight, and general health of the subject. Ultimately, the attending physician or veterinarian will decide the appropriate amount and dosage regimen. Such amount is referred to as an “effective” amount. In one embodiment, an effective amount is the amount of a base editor as described herein (e.g., a fusion protein comprising a programmable DNA binding protein, a nucleobase editor and gRNA) sufficient to introduce an alteration in a gene of interest (e.g., Mecp2) in a cell (e.g., a cell in vitro or in vivo). In one embodiment, an effective amount is the amount of a base editor required to achieve a therapeutic effect (e.g., to reduce or control Rett Syndrome or a symptom or condition thereof). Such therapeutic effect need not be sufficient to alter Mecp2 in all cells of a subject, tissue or organ, but only to alter Mecp2 in about 1%, 5%, 10%, 25%, 50%, 75% or more of the cells present in a subject, tissue or organ. In one embodiment, an effective amount is sufficient to ameliorate one or more symptoms of Rett Syndrome.

[0111] In some embodiments, an effective amount of a fusion protein provided herein, e.g., of a nucleobase editor comprising a nCas9 domain and a deaminase domain (e.g., adenosine deaminase) refers to the amount of the fusion protein that is sufficient to induce editing of a target site specifically bound and edited by the nucleobase editors described herein. As will be appreciated by the skilled artisan, the effective amount of an agent, e.g., a fusion protein, a nuclease, a hybrid protein, a protein dimer, a complex of a protein (or protein dimer) and a polynucleotide, or a polynucleotide, may vary depending on various factors as, for example, on the desired biological response, e.g., on the specific allele, genome, or target site to be edited, on the cell or tissue being targeted, and/or on the agent being used.

[0112] By “fragment” is meant a portion of a polypeptide or nucleic acid molecule. This portion contains, preferably, at least about 10%, 20%, 30%, 40%, 50%, 60%, 70%, 80%, or 90% of the entire length of the reference nucleic acid molecule or polypeptide. A fragment may contain 10, 20, 30, 40, 50, 60, 70, 80, 90, or 100, 200, 300, 400, 500, 600, 700, 800, 900, or 1000 nucleotides or amino acids.

[0113] By “guide RNA” or “gRNA” is meant a polynucleotide which can be specific for a target sequence and can form a complex with a polynucleotide programmable nucleotide binding domain protein (e.g., Cas9 or Cas12). In an embodiment, the guide polynucleotide is a guide RNA (gRNA). gRNAs can exist as a complex of two or more RNAs, or as a single RNA molecule. gRNAs that exist as a single RNA molecule may be referred to as single-guide RNAs (sgRNAs), though “gRNA” is used interchangeably to refer to guide RNAs that exist as either single molecules or as a complex of two or more molecules. Typically, gRNAs that exist as single RNA species comprise two domains: (1) a domain that shares homology to a target nucleic acid (e.g., and directs binding of a Cas9 or Cas12 complex to the target); and (2) a domain that binds a Cas9 or Cas12 protein. In some embodiments, domain (2) corresponds to a sequence known as a tracrRNA, and comprises a stem-loop structure. For example, in some embodiments, domain (2) is identical or homologous to a tracrRNA as provided in Jinek et al., Science 337:816-821(2012), the entire contents of which is incorporated herein by reference. Other examples of gRNAs (e.g., those including domain 2) can be found in U.S. Provisional Patent Application, U.S. Ser. No. 61/874,682, filed Sep. 6, 2013, entitled “Switchable Cas9 Nucleases and Uses Thereof,” and U.S. Provisional Patent Application, U.S. Ser. No. 61/874,746, filed Sep. 6, 2013, entitled “Delivery System For Functional Nucleases,” the entire contents of each are hereby incorporated by reference in their entirety. In some embodiments, a gRNA comprises two or more of domains (1) and (2), and may be referred to as an “extended gRNA.” An extended gRNA will bind two or more Cas9 or Cas12 proteins and bind a target nucleic acid at two or more distinct regions, as described herein. The gRNA comprises a nucleotide sequence that complements a target site, which mediates binding of the nuclease/RNA complex to said target site, providing the sequence specificity of the nuclease:RNA complex.

[0114] By “heterodimer” is meant a fusion protein comprising two domains, such as a wild type TadA domain and a variant of TadA domain (e.g., TadA*8) or two variant TadA domains (e.g., TadA*7.10 and TadA*8 or two TadA*8 domains).

[0115] “Hybridization” means hydrogen bonding, which may be Watson-Crick, Hoogsteen or reversed Hoogsteen hydrogen bonding, between complementary nucleobases. For example, adenine and thymine are complementary nucleobases that pair through the formation of hydrogen bonds.

[0116] By “increases” is meant a positive alteration of at least 10%, 25%, 50%, 75%, or 100%.

[0117] The term “inhibitor of base repair” or “IBR” refers to a protein that is capable in inhibiting the activity of a nucleic acid repair enzyme, for example a base excision repair enzyme. In some embodiments, the IBR is an inhibitor of inosine base excision repair (BER). Exemplary inhibitors of base repair include inhibitors of APE1, Endo III, Endo IV, Endo V, Endo VIII, Fpg, hOGG1, hNEIL1, T7 Endol, T4PDG, UDG, hSMUG1, and hAAG. In some embodiments, the IBR is an inhibitor of Endo V or hAAG. In some embodiments, the IBR is a catalytically inactive EndoV or a catalytically inactive hAAG. In some embodiments, the base repair inhibitor is an inhibitor of Endo V or hAAG. In some embodiments, the base repair inhibitor is a catalytically inactive EndoV or a catalytically inactive hAAG.

[0118] In some embodiments, the base repair inhibitor is uracil glycosylase inhibitor (UGI). UGI refers to a protein that is capable of inhibiting a uracil-DNA glycosylase base-excision repair enzyme. In some embodiments, a UGI domain comprises a wild-type UGI or a fragment of a wild-type UGI. In some embodiments, the UGI proteins provided herein include fragments of UGI and proteins homologous to a UGI or a UGI fragment. In some embodiments, the base repair inhibitor is an inhibitor of inosine base excision repair. In some embodiments, the base repair inhibitor is a “catalytically inactive inosine specific nuclease” or “dead inosine specific nuclease. Without wishing to be bound by any particular theory, catalytically inactive inosine glycosylases (e.g., alkyl adenine glycosylase (AAG)) can bind inosine, but cannot create an abasic site or remove the inosine, thereby sterically blocking the newly formed inosine moiety from DNA damage/repair mechanisms. In some embodiments, the catalytically inactive inosine specific nuclease can be capable of binding an inosine in a nucleic acid but does not cleave the nucleic acid. Non-limiting exemplary catalytically inactive inosine specific nucleases include catalytically inactive alkyl adenosine glycosylase (AAG nuclease), for example, from a human, and catalytically inactive endonuclease V (EndoV nuclease), for example, from E. coli. In some embodiments, the catalytically inactive AAG nuclease comprises an E125Q mutation or a corresponding mutation in another AAG nuclease.

[0119] An “intein” is a fragment of a protein that is able to excise itself and join the remaining fragments (the exteins) with a peptide bond in a process known as protein splicing. Inteins are also referred to as “protein introns.” The process of an intein excising itself and joining the remaining portions of the protein is herein termed “protein splicing” or “intein-mediated protein splicing.” In some embodiments, an intein of a precursor protein (an intein containing protein prior to intein-mediated protein splicing) comes from two genes. Such intein is referred to herein as a split intein (e.g., split intein-N and split intein-C). For example, in cyanobacteria, DnaE, the catalytic subunit a of DNA polymerase III, is encoded by two separate genes, dnaE-n and dnaE-c. The intein encoded by the dnaE-n gene may be herein referred as “intein-N.” The intein encoded by the dnaE-c gene may be herein referred as “intein-C.”

[0120] Other intein systems may also be used. For example, a synthetic intein based on the dnaE intein, the Cfa-N(e.g., split intein-N) and Cfa-C(e.g., split intein-C) intein pair, has been described (e.g., in Stevens et al., J Am Chem Soc. 2016 Feb. 24; 138(7):2162-5, incorporated herein by reference). Non-limiting examples of intein pairs that may be used in accordance with the present disclosure include: Cfa DnaE intein, Ssp GyrB intein, Ssp DnaX intein, Ter DnaE3 intein, Ter ThyX intein, Rma DnaB intein and Cne Prp8 intein (e.g., as described in U.S. Pat. No. 8,394,604, incorporated herein by reference.

[0121] Exemplary nucleotide and amino acid sequences of inteins are provided.

DnaE Intein-N DNA:
TGCCTGTCATACGAAACCGAGATACTGACAGTAGA
ATATGGCCTTCTGCCAATCGGGAAGATTGTGGAGA
AACGGATAGAATGCACAGTTTACTCTGTCGATAAC
AATGGTAACATTTATACTCAGCCAGTTGCCCAGTG
GCACGACCGGGGAGAGCAGGAAGTATTCGAATACT
GTCTGGAGGATGGAAGTCTCATTAGGGCCACTAAG
GACCACAAATTTATGACAGTCGATGGCCAGATGCT
GCCTATAGACGAAATCTTTGAGCGAGAGTTGGACC
TCATGCGAGTTGACAACCTTCCTAAT
DnaE Intein-N Protein:
CLSYETEILTVEYGLLPIGKIVEKRIECTVYSVDN
NGNIYTQPVAQWHDRGEQEVFEYCLEDGSLIRATK
DHKFMTVDGQMLPIDEIFERELDLMRVDNLPN
DnaE Intein-C DNA:
ATGATCAAGATAGCTACAAGGAAGTATCTTGGCAA
ACAAAACGTTTATGATATTGGAGTCGAAAGAGATC
ACAACTTTGCTCTGAAGAACGGATTCATAGCTTCT
AAT
Intein-C:
MIKIATRKYLGKQNVYDIGVERDHNFALKNGFIAS
N
Cfa-N DNA:
TGCCTGTCTTATGATACCGAGATACTTACCGTTGA
ATATGGCTTCTTGCCTATTGGAAAGATTGTCGAAG
AGAGAATTGAATGCACAGTATATACTGTAGACAAG
AATGGTTTCGTTTACACACAGCCCATTGCTCAATG
GCACAATCGCGGCGAACAAGAAGTATTTGAGTACT
GTCTCGAGGATGGAAGCATCATACGAGCAACTAAA
GATCATAAATTCATGACCACTGACGGGCAGATGTT
GCCAATAGATGAGATATTCGAGCGGGGCTTGGATC
TCAAACAAGTGGATGGATTGCCA
Cfa-N Protein:
CLSYDTEILTVEYGFLPIGKIVEERIECTVYTVDK
NGFVYTQPIAQWHNRGEQEVFEYCLEDGSIIRATK
DHKFMTTDGQMLPIDEIFERGLDLKQVDGLP
Cfa-C DNA
ATGAAGAGGACTGCCGATGGATCAGAGTTTGAATC
TCCCAAGAAGAAGAGGAAAGTAAAGATAATATCTC
GAAAAAGTCTTGGTACCCAAAATGTCTATGATATT
GGAGTGGAGAAAGATCACAACTTCCTTCTCAAGAA
CGGTCTCGTAGCCAGCAAC
Cfa-C Protein:
MKRTADGSEFESPKKKRKVKIISRKSLGTQNVYDI
GVEKDHNFLLKNGLVASN

[0122] Intein-N and intein-C may be fused to the N-terminal portion of the split Cas9 and the C-terminal portion of the split Cas9, respectively, for the joining of the N-terminal portion of the split Cas9 and the C-terminal portion of the split Cas9. For example, in some embodiments, an intein-N is fused to the C-terminus of the N-terminal portion of the split Cas9, i.e., to form a structure of N—[N-terminal portion of the split Cas9]-[intein-N]—C. In some embodiments, an intein-C is fused to the N-terminus of the C-terminal portion of the split Cas9, i.e., to form a structure of N-[intein-C]—[C-terminal portion of the split Cas9]-C. The mechanism of intein-mediated protein splicing for joining the proteins the inteins are fused to (e.g., split Cas9) is known in the art, e.g., as described in Shah et al., Chem Sci. 2014; 5(1):446-461, incorporated herein by reference. Methods for designing and using inteins are known in the art and described, for example by WO2014004336, WO2017132580, US20150344549, and US20180127780, each of which is incorporated herein by reference in their entirety.

[0123] The terms “isolated,” “purified,” or “biologically pure” refer to material that is free to varying degrees from components which normally accompany it as found in its native state. “Isolate” denotes a degree of separation from original source or surroundings. “Purify” denotes a degree of separation that is higher than isolation. A “purified” or “biologically pure” protein is sufficiently free of other materials such that any impurities do not materially affect the biological properties of the protein or cause other adverse consequences. That is, a nucleic acid or peptide as described herein is purified if it is substantially free of cellular material, viral material, or culture medium when produced by recombinant DNA techniques, or chemical precursors or other chemicals when chemically synthesized. Purity and homogeneity are typically determined using analytical chemistry techniques, for example, polyacrylamide gel electrophoresis or high-performance liquid chromatography. The term “purified” can denote that a nucleic acid or protein gives rise to essentially one band in an electrophoretic gel. For a protein that can be subjected to modifications, for example, phosphorylation or glycosylation, different modifications may give rise to different isolated proteins, which can be separately purified.

[0124] By “isolated polynucleotide” is meant a nucleic acid (e.g., a DNA) that is free of the genes which, in the naturally-occurring genome of the organism from which the nucleic acid molecule as described herein is derived, flank the gene. The term therefore includes, for example, a recombinant DNA that is incorporated into a vector; into an autonomously replicating plasmid or virus; or into the genomic DNA of a prokaryote or eukaryote; or that exists as a separate molecule (for example, a cDNA or a genomic or cDNA fragment produced by PCR or restriction endonuclease digestion) independent of other sequences. In addition, the term includes an RNA molecule that is transcribed from a DNA molecule, as well as a recombinant DNA that is part of a hybrid gene encoding additional polypeptide sequence.

[0125] By an “isolated polypeptide” is meant a polypeptide as described herein that has been separated from components that naturally accompany it. Typically, the polypeptide is isolated when it is at least 60%, by weight, free from the proteins and naturally-occurring organic molecules with which it is naturally associated. Preferably, the preparation is at least 75%, more preferably at least 90%, and most preferably at least 99%, by weight, of a polypeptide as described herein. An isolated polypeptide of the disclosure may be obtained, for example, by extraction from a natural source, by expression of a recombinant nucleic acid encoding such a polypeptide; or by chemically synthesizing the protein. Purity can be measured by any appropriate method, for example, column chromatography, polyacrylamide gel electrophoresis, or by HPLC analysis.

[0126] The term “linker”, as used herein, can refer to a covalent linker (e.g., covalent bond), a non-covalent linker, a chemical group, or a molecule linking two molecules or moieties, e.g., two components of a protein complex or a ribonucleocomplex, or two domains of a fusion protein, such as, for example, a polynucleotide programmable DNA binding domain (e.g., dCas9) and a deaminase domain (e.g., an adenosine deaminase). A linker can join different components of, or different portions of components of, a base editor system. For example, in some embodiments, a linker can join a guide polynucleotide binding domain of a polynucleotide programmable nucleotide binding domain and a catalytic domain of a deaminase. In some embodiments, a linker can join a CRISPR polypeptide and a deaminase. In some embodiments, a linker can join a Cas9 and a deaminase. In some embodiments, a linker can join a dCas9 and a deaminase. In some embodiments, a linker can join a nCas9 and a deaminase. In some embodiments, a linker can join a guide polynucleotide and a deaminase. In some embodiments, a linker can join a deaminating component and a polynucleotide programmable nucleotide binding component of a base editor system. In some embodiments, a linker can join a RNA-binding portion of a deaminating component and a polynucleotide programmable nucleotide binding component of a base editor system. In some embodiments, a linker can join a RNA-binding portion of a deaminating component and a RNA-binding portion of a polynucleotide programmable nucleotide binding component of a base editor system. A linker can be positioned between, or flanked by, two groups, molecules, or other moieties and connected to each one via a covalent bond or non-covalent interaction, thus connecting the two. In some embodiments, the linker can be an organic molecule, group, polymer, or chemical moiety. In some embodiments, the linker can be a polynucleotide. In some embodiments, the linker can be a DNA linker. In some embodiments, the linker can be a RNA linker. In some embodiments, a linker can comprise an aptamer capable of binding to a ligand. In some embodiments, the ligand may be carbohydrate, a peptide, a protein, or a nucleic acid. In some embodiments, the linker may comprise an aptamer may be derived from a riboswitch. The riboswitch from which the aptamer is derived may be selected from a theophylline riboswitch, a thiamine pyrophosphate (TPP) riboswitch, an adenosine cobalamin (AdoCbl) riboswitch, an S-adenosyl methionine (SAM) riboswitch, an SAH riboswitch, a flavin mononucleotide (FMN) riboswitch, a tetrahydrofolate riboswitch, a lysine riboswitch, a glycine riboswitch, a purine riboswitch, a GlmS riboswitch, or a pre-queosinel (PreQ1) riboswitch. In some embodiments, a linker may comprise an aptamer bound to a polypeptide or a protein domain, such as a polypeptide ligand. In some embodiments, the polypeptide ligand may be a K Homology (KH) domain, a MS2 coat protein domain, a PP7 coat protein domain, a SfMu Com coat protein domain, a sterile alpha motif, a telomerase Ku binding motif and Ku protein, a telomerase Sm7 binding motif and Sm7 protein, or a RNA recognition motif. In some embodiments, the polypeptide ligand may be a portion of a base editor system component. For example, a nucleobase editing component may comprise a deaminase domain and a RNA recognition motif.

[0127] In some embodiments, the linker can be an amino acid or a plurality of amino acids (e.g., a peptide or protein). In some embodiments, the linker can be about 5-100 amino acids in length, for example, about 5, 6, 7, 8, 9, 10, 11, 12, 13, 14, 15, 16, 17, 18, 19, 20, 20-30, 30-40, 40-50, 50-60, 60-70, 70-80, 80-90, or 90-100 amino acids in length. In some embodiments, the linker can be about 100-150, 150-200, 200-250, 250-300, 300-350, 350-400, 400-450, or 450-500 amino acids in length. Longer or shorter linkers can be also contemplated.

[0128] In some embodiments, a linker joins a gRNA binding domain of an RNA-programmable nuclease, including a Cas9 nuclease domain, and the catalytic domain of a nucleic acid editing protein (e.g., adenosine deaminase). In some embodiments, a linker joins a dCas9 and a nucleic acid editing protein. For example, the linker is positioned between, or flanked by, two groups, molecules, or other moieties and connected to each one via a covalent bond, thus connecting the two. In some embodiments, the linker is an amino acid or a plurality of amino acids (e.g., a peptide or protein). In some embodiments, the linker is an organic molecule, group, polymer, or chemical moiety. In some embodiments, the linker is 5-200 amino acids in length, for example, 5, 6, 7, 8, 9, 10, 11, 12, 13, 14, 15, 16, 17, 18, 19, 20, 25, 35, 45, 50, 55, 60, 60, 65, 70, 70, 75, 80, 85, 90, 90, 95, 100, 101, 102, 103, 104, 105, 110, 120, 130, 140, 150, 160, 175, 180, 190, or 200 amino acids in length. Longer or shorter linkers are also contemplated. In some embodiments, a linker comprises the amino acid sequence SGSETPGTSESATPES, which may also be referred to as the XTEN linker. In some embodiments, a linker comprises the amino acid sequence SGGS. In some embodiments, a linker comprises (SGGS)ₙ, (GGGS)ₙ, (GGGGS)ₙ, (G)ₙ, (EAAAK)ₙ, (GGS)ₙ, SGSETPGTSESATPES, or (XP)ₙ motif, or a combination of any of these, where n is independently an integer between 1 and 30, and where X is any amino acid. In some embodiments, n is 1, 2, 3, 4, 5, 6, 7, 8, 9, 10, 11, 12, 13, 14, or 15. In some embodiments, a linker comprises a plurality of proline residues and is 5-21, 5-14, 5-9, 5-7 amino acids in length, e.g., PAPAP, PAPAPA, PAPAPAP, PAPAPAPA, P(AP)₄, P(AP)₇, P(AP)₁₀. Such proline-rich linkers are also termed “rigid” linkers.

[0129] In some embodiments, the domains of a base editor are fused via a linker that comprises the amino acid sequence of:

SGGSSGSETPGTSESATPESSGGS,
SGGSSGGSSGSETPGTSESATPESSGGSSGGS,
or
GGSGGSPGSPAGSPTSTEEGTSESATPESGPG
TSTEPSEGSAPGSPAGSPTSTEEGTSTEPSEG
SAPGTSTEPSEGSAPGTSESATPESGPGSEPA
TSGGSGGS.

[0130] In some embodiments, domains of the base editor are fused via a linker comprising the amino acid sequence SGSETPGTSESATPES, which may also be referred to as the XTEN linker. In some embodiments, the linker is 24 amino acids in length. In some embodiments, the linker comprises the amino acid sequence SGGSSGGSSGSETPGTSESATPES. In some embodiments, the linker is 40 amino acids in length. In some embodiments, the linker comprises the amino acid sequence SGGSSGGSSGSETPGTSESATPESSGGSSGGSSGGSSGGS. In some embodiments, the linker is 64 amino acids in length. In some embodiments, the linker comprises the amino acid sequence

SGGSSGGSSGSETPGTSESATPESSGGSSGGS
SGGSSGGSSGSETPGTSESATPESSGGSSGGS.

[0131] In some embodiments, the linker is 92 amino acids in length. In some embodiments, the linker comprises the amino acid sequence

PGSPAGSPTSTEEGTSESATPESGPGTSTEPS
EGSAPGSPAGSPTSTEEGTSTEPSEGSAPGTS
TEPSEGSAPGTSESATPESGPGSEPATS.

[0132] The term “mutation,” as used herein, refers to a substitution of a residue within a sequence, e.g., a nucleic acid or amino acid sequence, with another residue, or a deletion or insertion of one or more residues within a sequence. Mutations are typically described herein by identifying the original residue followed by the position of the residue within the sequence and by the identity of the newly substituted residue. Various methods for making the amino acid substitutions (mutations) provided herein are well known in the art, and are provided by, for example, Green and Sambrook, Molecular Cloning: A Laboratory Manual (4th ed., Cold Spring Harbor Laboratory Press, Cold Spring Harbor, N.Y. (2012)). In some embodiments, the presently disclosed base editors can efficiently generate an “intended mutation,” such as a point mutation, in a nucleic acid (e.g., a nucleic acid within a genome of a subject) without generating a significant number of unintended mutations, such as unintended point mutations. In some embodiments, an intended mutation is a mutation that is generated by a specific base editor (e.g., adenosine base editor) bound to a guide polynucleotide (e.g., gRNA), specifically designed to generate the intended mutation. In general, mutations made or identified in a sequence (e.g., an amino acid sequence as described herein) are numbered in relation to a reference (or wild type) sequence, i.e., a sequence that does not contain the mutations. The skilled practitioner in the art would readily understand how to determine the position of mutations in amino acid and nucleic acid sequences relative to a reference sequence.

[0133] The term “non-conservative mutations” involve amino acid substitutions between different groups, for example, lysine for tryptophan, or phenylalanine for serine, etc. In this case, it is preferable for the non-conservative amino acid substitution to not interfere with, or inhibit the biological activity of, the functional variant. The non-conservative amino acid substitution can enhance the biological activity of the functional variant, such that the biological activity of the functional variant is increased as compared to the wild-type protein.

[0134] The term “nuclear localization sequence,” “nuclear localization signal,” or “NLS” refers to an amino acid sequence that promotes import of a protein into the cell nucleus. Nuclear localization sequences are known in the art and described, for example, in Plank et al., International PCT application, PCT/EP2000/011690, filed Nov. 23, 2000, published as WO/2001/038547 on May 31, 2001, the contents of which are incorporated herein by reference for their disclosure of exemplary nuclear localization sequences. In other embodiments, the NLS is an optimized NLS described, for example, by Koblan et al., Nature Biotech. 2018 doi:10.1038/nbt.4172. In some embodiments, an NLS comprises the amino acid sequence

KRTADGSEFESPKKKRKV,
KRPAATKKAGQAKKKK,
KKTELQTTNAENKTKKL,
KRGINDRNFWRGENGRKTR,
RKSGKIAAIVVKRPRK,
PKKKRKV,
or
MDSLLMNRRKFLYQFKNVRWAKGRRETYLC

[0135] The terms “nucleic acid” and “nucleic acid molecule,” as used herein, refer to a compound comprising a nucleobase and an acidic moiety, e.g., a nucleoside, a nucleotide, or a polymer of nucleotides. Typically, polymeric nucleic acids, e.g., nucleic acid molecules comprising three or more nucleotides are linear molecules, in which adjacent nucleotides are linked to each other via a phosphodiester linkage. In some embodiments, “nucleic acid” refers to individual nucleic acid residues (e.g., nucleotides and/or nucleosides). In some embodiments, “nucleic acid” refers to an oligonucleotide chain comprising three or more individual nucleotide residues. As used herein, the terms “oligonucleotide” and “polynucleotide” can be used interchangeably to refer to a polymer of nucleotides (e.g., a string of at least three nucleotides). In some embodiments, “nucleic acid” encompasses RNA as well as single and/or double-stranded DNA. Nucleic acids may be naturally occurring, for example, in the context of a genome, a transcript, an mRNA, tRNA, rRNA, siRNA, snRNA, a plasmid, cosmid, chromosome, chromatid, or other naturally occurring nucleic acid molecule. On the other hand, a nucleic acid molecule may be a non-naturally occurring molecule, e.g., a recombinant DNA or RNA, an artificial chromosome, an engineered genome, or fragment thereof, or a synthetic DNA, RNA, DNA/RNA hybrid, or including non-naturally occurring nucleotides or nucleosides. Furthermore, the terms “nucleic acid,” “DNA,” “RNA,” and/or similar terms include nucleic acid analogs, e.g., analogs having other than a phosphodiester backbone. Nucleic acids can be purified from natural sources, produced using recombinant expression systems and optionally purified, chemically synthesized, etc. Where appropriate, e.g., in the case of chemically synthesized molecules, nucleic acids can comprise nucleoside analogs such as analogs having chemically modified bases or sugars, and backbone modifications. A nucleic acid sequence is presented in the 5′ to 3′ direction unless otherwise indicated. In some embodiments, a nucleic acid is or comprises natural nucleosides (e.g., adenosine, thymidine, guanosine, cytidine, uridine, deoxyadenosine, deoxythymidine, deoxyguanosine, and deoxycytidine); nucleoside analogs (e.g., 2-aminoadenosine, 2-thiothymidine, inosine, pyrrolo-pyrimidine, 3-methyl adenosine, 5-methylcytidine, 2-aminoadenosine, C5-bromouridine, C5-fluorouridine, C5-iodouridine, C5-propynyl-uridine, C5-propynyl-cytidine, C5-methylcytidine, 2-aminoadenosine, 7-deazaadenosine, 7-deazaguanosine, 8-oxoadenosine, 8-oxoguanosine, 0(6)-methylguanine, and 2-thiocytidine); chemically modified bases; biologically modified bases (e.g., methylated bases); intercalated bases; modified sugars (e.g., 2′-fluororibose, ribose, 2′-deoxyribose, arabinose, and hexose); and/or modified phosphate groups (e.g., phosphorothioates and 5′-N-phosphoramidite linkages).

[0136] The term “nucleobase,” “nitrogenous base,” or “base,” used interchangeably herein, refers to a nitrogen-containing biological compound that forms a nucleoside, which in turn is a component of a nucleotide. The ability of nucleobases to form base pairs and to stack one upon another leads directly to long-chain helical structures such as ribonucleic acid (RNA) and deoxyribonucleic acid (DNA). Five nucleobases—adenine (A), cytosine (C), guanine (G), thymine (T), and uracil (U)— are called primary or canonical. Adenine and guanine are derived from purine, and cytosine, uracil, and thymine are derived from pyrimidine. DNA and RNA can also contain other (non-primary) bases that are modified. Non-limiting exemplary modified nucleobases can include hypoxanthine, xanthine, 7-methylguanine, 5,6-dihydrouracil, 5-methylcytosine (m5C), and 5-hydromethylcytosine. Hypoxanthine and xanthine can be created through mutagen presence, both of them through deamination (replacement of the amine group with a carbonyl group). Hypoxanthine can be modified from adenine. Xanthine can be modified from guanine. Uracil can result from deamination of cytosine. A “nucleoside” consists of a nucleobase and a five-carbon sugar (either ribose or deoxyribose). Examples of a nucleoside include adenosine, guanosine, uridine, cytidine, 5-methyluridine (m5U), deoxyadenosine, deoxyguanosine, thymidine, deoxyuridine, and deoxycytidine. Examples of a nucleoside with a modified nucleobase includes inosine (I), xanthosine (X), 7-methylguanosine (m7G), dihydrouridine (D), 5-methylcytidine (m5C), and pseudouridine (4′). A “nucleotide” consists of a nucleobase, a five-carbon sugar (either ribose or deoxyribose), and at least one phosphate group.

[0137] The term “nucleic acid programmable DNA binding protein” or “napDNAbp” may be used interchangeably with “polynucleotide programmable nucleotide binding domain” to refer to a protein that associates with a nucleic acid (e.g., DNA or RNA), such as a guide nucleic acid (e.g., gRNA), that guides the napDNAbp to a specific nucleic acid sequence. In some embodiments, the polynucleotide programmable nucleotide binding domain is a polynucleotide programmable DNA binding domain. In some embodiments, the polynucleotide programmable nucleotide binding domain is a polynucleotide programmable RNA binding domain. In some embodiments, the polynucleotide programmable nucleotide binding domain is a Cas9 protein. A Cas9 protein can associate with a guide RNA that guides the Cas9 protein to a specific DNA sequence that is complementary to the guide RNA. In some embodiments, the napDNAbp is a Cas9 domain, for example a nuclease active Cas9, a Cas9 nickase (nCas9), or a nuclease inactive Cas9 (dCas9). Non-limiting examples of nucleic acid programmable DNA binding proteins include, without limitation, Cas9 (e.g., dCas9 and nCas9), Cas12a/Cpf1, Cas12b/C2c1, Cas12c/C2c3, Cas12d/CasY, Cas12e/CasX, Cas12g, Cas12h, and Cas12i. Non-limiting examples of Cas enzymes include Cas1, Cas1B, Cas2, Cas3, Cas4, Cas5, Cas5d, Cas5t, Cas5h, Cas5a, Cash, Cas7, Cas8, Cas8a, Cas8b, Cas8c, Cas9 (also known as Csn1 or Csx12), Cas10, Cas10d, Cas12a/Cpf1, Cas12b/C2c1, Cas12c/C2c3, Cas12d/CasY, Cas12e/CasX, Cas12g, Cas12h, Cas12i, Csy1, Csy2, Csy3, Csy4, Cse1, Cse2, Cse3, Cse4, Cse5e, Csc1, Csc2, Csa5, Csn1, Csn2, Csm1, Csm2, Csm3, Csm4, Csm5, Csm6, Cmr1, Cmr3, Cmr4, Cmr5, Cmr6, Csb1, Csb2, Csb3, Csx17, Csx14, Csx10, Csx16, CsaX, Csx3, Csx1, Csx1S, Csx1 1, Csf1, Csf2, CsO, Csf4, Csd1, Csd2, Cst1, Cst2, Csh1, Csh2, Csa1, Csa2, Csa3, Csa4, Csa5, Type II Cas effector proteins, Type V Cas effector proteins, Type VI Cas effector proteins, CARF, DinG, homologues thereof, or modified or engineered versions thereof. Other nucleic acid programmable DNA binding proteins are also within the scope of this disclosure, although they may not be specifically listed in this disclosure. See, e.g., Makarova et al. “Classification and Nomenclature of CRISPR-Cas Systems: Where from Here?” CRISPR J. 2018 October; 1:325-336. doi: 10.1089/crispr.2018.0033; Yan et al., “Functionally diverse type V CRISPR-Cas systems” Science. 2019 Jan. 4; 363(6422):88-91. doi: 10.1126/science.aav7271, the entire contents of each are hereby incorporated by reference.

[0138] The terms “nucleobase editing domain” or “nucleobase editing protein,” as used herein, refers to a protein or enzyme that can catalyze a nucleobase modification in RNA or DNA, such as cytosine (or cytidine) to uracil (or uridine) or thymine (or thymidine), and adenine (or adenosine) to hypoxanthine (or inosine) deaminations, as well as non-templated nucleotide additions and insertions. In some embodiments, the nucleobase editing domain is a deaminase domain (e.g., an adenine deaminase or an adenosine deaminase). In some embodiments, the nucleobase editing domain can be a naturally occurring nucleobase editing domain. In some embodiments, the nucleobase editing domain can be an engineered or evolved nucleobase editing domain from the naturally occurring nucleobase editing domain. The nucleobase editing domain can be from any organism, such as a bacterium, human, chimpanzee, gorilla, monkey, cow, dog, rat, or mouse.

[0139] As used herein, “obtaining” as in “obtaining an agent” includes synthesizing, purchasing, or otherwise acquiring the agent.

[0140] A “patient” or “subject” as used herein refers to a mammalian subject or individual diagnosed with, at risk of having or developing, or suspected of having or developing a disease or a disorder. In some embodiments, the term “patient” refers to a mammalian subject with a higher than average likelihood of developing a disease or a disorder. Exemplary patients can be humans, non-human primates, cats, dogs, pigs, cattle, cats, horses, camels, llamas, goats, sheep, rodents (e.g., mice, rabbits, rats, or guinea pigs) and other mammalians that can benefit from the therapies disclosed herein. Exemplary human patients can be male and/or female.

[0141] “Patient in need thereof” or “subject in need thereof” is referred to herein as a patient diagnosed with, at risk or having, predetermined to have, or suspected of having a disease or disorder, for instance, but not restricted to Rett Syndrome (RTT).

[0142] The terms “pathogenic mutation,” “pathogenic variant,” “disease casing mutation,” “disease causing variant,” “deleterious mutation,” or “predisposing mutation” refers to a genetic alteration or mutation that increases an individual's susceptibility or predisposition to a certain disease or disorder. In some embodiments, the pathogenic mutation comprises at least one wild-type amino acid substituted by at least one pathogenic amino acid in a protein encoded by a gene.

[0143] The term “pharmaceutically-acceptable carrier” means a pharmaceutically-acceptable material, composition or vehicle, such as a liquid or solid filler, diluent, excipient, manufacturing aid (e.g., lubricant, talc magnesium, calcium or zinc stearate, or steric acid), or solvent encapsulating material, involved in carrying or transporting the compound from one site (e.g., the delivery site) of the body, to another site (e.g., organ, tissue or portion of the body). A pharmaceutically acceptable carrier is “acceptable” in the sense of being compatible with the other ingredients of the formulation and not injurious to the tissue of the subject (e.g., physiologically compatible, sterile, physiologic pH, etc.). The terms such as “excipient,” “carrier,” “pharmaceutically acceptable carrier,” “vehicle,” or the like are used interchangeably herein.

[0144] The term “pharmaceutical composition” means a composition formulated for pharmaceutical use.

[0145] The terms “protein,” “peptide,” “polypeptide,” and their grammatical equivalents are used interchangeably herein, and refer to a polymer of amino acid residues linked together by peptide (amide) bonds. The terms refer to a protein, peptide, or polypeptide of any size, structure, or function. Typically, a protein, peptide, or polypeptide will be at least three amino acids long. A protein, peptide, or polypeptide can refer to an individual protein or a collection of proteins. One or more of the amino acids in a protein, peptide, or polypeptide can be modified, for example, by the addition of a chemical entity such as a carbohydrate group, a hydroxyl group, a phosphate group, a farnesyl group, an isofarnesyl group, a fatty acid group, a linker for conjugation, functionalization, or other modifications, etc. A protein, peptide, or polypeptide can also be a single molecule or can be a multi-molecular complex. A protein, peptide, or polypeptide can be just a fragment of a naturally occurring protein or peptide. A protein, peptide, or polypeptide can be naturally occurring, recombinant, or synthetic, or any combination thereof. The term “fusion protein” as used herein refers to a hybrid polypeptide which comprises protein domains from at least two different proteins. One protein can be located at the amino-terminal (N-terminal) portion of the fusion protein or at the carboxy-terminal (C-terminal) protein thus forming an amino-terminal fusion protein or a carboxy-terminal fusion protein, respectively. A protein can comprise different domains, for example, a nucleic acid binding domain (e.g., the gRNA binding domain of Cas9 that directs the binding of the protein to a target site) and a nucleic acid cleavage domain, or a catalytic domain of a nucleic acid editing protein. In some embodiments, a protein comprises a proteinaceous part, e.g., an amino acid sequence constituting a nucleic acid binding domain, and an organic compound, e.g., a compound that can act as a nucleic acid cleavage agent. In some embodiments, a protein is in a complex with, or is in association with, a nucleic acid, e.g., RNA or DNA. Any of the proteins provided herein can be produced by any method known in the art. For example, the proteins provided herein can be produced via recombinant protein expression and purification, which is especially suited for fusion proteins comprising a peptide linker. Methods for recombinant protein expression and purification are well known, and include those described by Green and Sambrook, Molecular Cloning: A Laboratory Manual (4th ed., Cold Spring Harbor Laboratory Press, Cold Spring Harbor, N.Y. (2012)), the entire contents of which are incorporated herein by reference.

[0146] Polypeptides and proteins disclosed herein (including functional portions and functional variants thereof) can comprise synthetic amino acids in place of one or more naturally-occurring amino acids. Such synthetic amino acids are known in the art, and include, for example, aminocyclohexane carboxylic acid, norleucine, α-amino n-decanoic acid, homoserine, S-acetylaminomethyl-cysteine, trans-3- and trans-4-hydroxyproline, 4-aminophenylalanine, 4-nitrophenylalanine, 4-chlorophenylalanine, 4-carboxyphenylalanine, β-phenylserine β-hydroxyphenylalanine, phenylglycine, α-naphthylalanine, cyclohexylalanine, cyclohexylglycine, indoline-2-carboxylic acid, 1,2,3,4-tetrahydroisoquinoline-3-carboxylic acid, aminomalonic acid, aminomalonic acid monoamide, N′-benzyl-N′-methyl-lysine, N′,N′-dibenzyl-lysine, 6-hydroxylysine, ornithine, α-aminocyclopentane carboxylic acid, α-aminocyclohexane carboxylic acid, α-aminocycloheptane carboxylic acid, α-(2-amino-2-norbornane)-carboxylic acid, α,γ-diaminobutyric acid, α,β-diaminopropionic acid, homophenylalanine, and α-tert-butylglycine. The polypeptides and proteins can be associated with post-translational modifications of one or more amino acids of the polypeptide constructs. Non-limiting examples of post-translational modifications include phosphorylation, acylation including acetylation and formylation, glycosylation (including N-linked and O-linked), amidation, hydroxylation, alkylation including methylation and ethylation, ubiquitylation, addition of pyrrolidone carboxylic acid, formation of disulfide bridges, sulfation, myristoylation, palmitoylation, isoprenylation, farnesylation, geranylation, glypiation, lipoylation and iodination.

[0147] The term “recombinant” as used herein in the context of proteins or nucleic acids refers to proteins or nucleic acids that do not occur in nature, but are the product of human engineering. For example, in some embodiments, a recombinant protein or nucleic acid molecule comprises an amino acid or nucleotide sequence that comprises at least one, at least two, at least three, at least four, at least five, at least six, or at least seven mutations as compared to any naturally occurring sequence.

[0148] By “reduces” is meant a negative alteration of at least 10%, 25%, 50%, 75%, or 100%.

[0149] By “reference” is meant a standard or control condition. In one embodiment, the reference is a wild-type or healthy cell. In other embodiments and without limitation, a reference is an untreated cell that is not subjected to a test condition, or is subjected to placebo or normal saline, medium, buffer, and/or a control vector that does not harbor a polynucleotide of interest.

[0150] A “reference sequence” is a defined sequence used as a basis for sequence comparison. A reference sequence may be a subset of or the entirety of a specified sequence; for example, a segment of a full-length cDNA or gene sequence, or the complete cDNA or gene sequence. For polypeptides, the length of the reference polypeptide sequence will generally be at least about 16 amino acids, preferably at least about 20 amino acids, more preferably at least about 25 amino acids, and even more preferably about 35 amino acids, about 50 amino acids, or about 100 amino acids. For nucleic acids, the length of the reference nucleic acid sequence will generally be at least about 50 nucleotides, preferably at least about 60 nucleotides, more preferably at least about 75 nucleotides, and even more preferably about 100 nucleotides or about 300 nucleotides or any integer thereabout or therebetween. In some embodiments, a reference sequence is a wild-type sequence of a protein of interest. In other embodiments, a reference sequence is a polynucleotide sequence encoding a wild-type protein.

[0151] The term “RNA-programmable nuclease,” and “RNA-guided nuclease” are used with (e.g., binds or associates with) one or more RNA(s) that is not a target for cleavage. In some embodiments, an RNA-programmable nuclease, when in a complex with an RNA, may be referred to as a nuclease:RNA complex. Typically, the bound RNA(s) is referred to as a guide RNA (gRNA). gRNAs can exist as a complex of two or more RNAs, or as a single RNA molecule. gRNAs that exist as a single RNA molecule may be referred to as single-guide RNAs (sgRNAs), though “gRNA” is used interchangeably to refer to guide RNAs that exist as either single molecules or as a complex of two or more molecules. Typically, gRNAs that exist as single RNA species comprise two domains: (1) a domain that shares homology to a target nucleic acid (e.g., and directs binding of a Cas9 complex to the target); and (2) a domain that binds a Cas9 protein. In some embodiments, domain (2) corresponds to a sequence known as a tracrRNA, and comprises a stem-loop structure. For example, in some embodiments, domain (2) is identical or homologous to a tracrRNA as provided in Jinek et al., Science 337:816-821(2012), the entire contents of which is incorporated herein by reference. Other examples of gRNAs (e.g., those including domain 2) can be found in U.S. Provisional Patent Application, U.S. Ser. No. 61/874,682, filed Sep. 6, 2013, entitled “Switchable Cas9 Nucleases and Uses Thereof,” and U.S. Provisional Patent Application, U.S. Ser. No. 61/874,746, filed Sep. 6, 2013, entitled “Delivery System For Functional Nucleases,” the entire contents of each are hereby incorporated by reference in their entirety. In some embodiments, a gRNA comprises two or more of domains (1) and (2), and may be referred to as an “extended gRNA.” For example, an extended gRNA will, e.g., bind two or more Cas9 proteins and bind a target nucleic acid at two or more distinct regions, as described herein. The gRNA comprises a nucleotide sequence that complements a target site, which mediates binding of the nuclease/RNA complex to said target site, providing the sequence specificity of the nuclease:RNA complex.

[0152] In some embodiments, the RNA-programmable nuclease is the (CRISPR-associated system) Cas9 endonuclease, for example, Cas9 (Casn1) from Streptococcus pyogenes (see, e.g., “Complete genome sequence of an M1 strain of Streptococcus pyogenes.” Ferretti J. J., et al., Proc. Natl. Acad. Sci. U.S.A. 98:4658-4663(2001); “CRISPR RNA maturation by trans-encoded small RNA and host factor RNase III.” Deltcheva E., et al., Nature 471:602-607(2011).

[0153] Because RNA-programmable nucleases (e.g., Cas9) use RNA:DNA hybridization to target DNA cleavage sites, these proteins are able to be targeted, in principle, to any sequence specified by the guide RNA. Methods of using RNA-programmable nucleases, such as Cas9, for site-specific cleavage (e.g., to modify a genome) are known in the art (see e.g., Cong, L. et al., Multiplex genome engineering using CRISPR/Cas systems. Science 339, 819-823 (2013); Mali, P., et al., RNA-guided human genome engineering via Cas9. Science 339, 823-826 (2013); Hwang, W. Y. et al., Efficient genome editing in zebrafish using a CRISPR-Cas system. Nature biotechnology 31, 227-229 (2013); Jinek, M. et al., RNA-programmed genome editing in human cells. eLife 2, e00471 (2013); Dicarlo, J. E. et al., Genome engineering in Saccharomyces cerevisiae using CRISPR-Cas systems. Nucleic acids research (2013); Jiang, W. et al. RNA-guided editing of bacterial genomes using CRISPR-Cas systems. Nature biotechnology 31, 233-239 (2013); the entire contents of each of which are incorporated herein by reference).

[0154] The term “single nucleotide polymorphism (SNP)” is a variation in a single nucleotide that occurs at a specific position in the genome, where each variation is present to some appreciable degree within a population (e.g., >1%). For example, at a specific base position in the human genome, the C nucleotide can appear in most individuals, but in a minority of individuals, the position is occupied by an A. This means that there is a SNP at this specific position, and the two possible nucleotide variations, C or A, are said to be alleles for this position. SNPs underlie differences in susceptibility to disease. The severity of illness and the way our body responds to treatments are also manifestations of genetic variations. SNPs can fall within coding regions of genes, non-coding regions of genes, or in the intergenic regions (regions between genes). In some embodiments, SNPs within a coding sequence do not necessarily change the amino acid sequence of the protein that is produced, due to degeneracy of the genetic code. SNPs in the coding region are of two types: synonymous and nonsynonymous SNPs. Synonymous SNPs do not affect the protein sequence, while nonsynonymous SNPs change the amino acid sequence of protein. The nonsynonymous SNPs are of two types: missense and nonsense. SNPs that are not in protein-coding regions can still affect gene splicing, transcription factor binding, messenger RNA degradation, or the sequence of noncoding RNA. Gene expression affected by this type of SNP is referred to as an eSNP (expression SNP) and can be upstream or downstream from the gene. A single nucleotide variant (SNV) is a variation in a single nucleotide without any limitations of frequency and can arise in somatic cells. A somatic single nucleotide variation (e.g., associated with cancer) can also be called a single-nucleotide alteration.

[0155] By “specifically binds” is meant a nucleic acid molecule, polypeptide, or complex thereof (e.g., a nucleic acid programmable DNA binding domain and guide nucleic acid), compound, or molecule that recognizes and binds a polypeptide and/or nucleic acid molecule of the disclosure, but which does not substantially recognize and bind other molecules in a sample, for example, a biological sample.

[0156] Nucleic acid molecules useful in the methods as described herein include any nucleic acid molecule that encodes a polypeptide of the of the disclosure, or a fragment thereof. Such nucleic acid molecules need not be 100% identical with an endogenous nucleic acid sequence, but will typically exhibit substantial identity. Polynucleotides having “substantial identity” to an endogenous sequence are typically capable of hybridizing with at least one strand of a double-stranded nucleic acid molecule. Nucleic acid molecules useful in the methods described herein include any nucleic acid molecule that encodes a polypeptide of the disclosure, or a fragment thereof. Such nucleic acid molecules need not be 100% identical with an endogenous nucleic acid sequence, but will typically exhibit substantial identity. Polynucleotides having “substantial identity” to an endogenous sequence are typically capable of hybridizing with at least one strand of a double-stranded nucleic acid molecule. By “hybridize” is meant pair to form a double-stranded molecule between complementary polynucleotide sequences (e.g., a gene described herein), or portions thereof, under various conditions of stringency. (See, e.g., Wahl, G. M. and S. L. Berger (1987) Methods Enzymol. 152:399; Kimmel, A. R. (1987) Methods Enzymol. 152:507).

[0157] For example, stringent salt concentration will ordinarily be less than about 750 mM NaCl and 75 mM trisodium citrate, preferably less than about 500 mM NaCl and 50 mM trisodium citrate, and more preferably less than about 250 mM NaCl and 25 mM trisodium citrate. Low stringency hybridization can be obtained in the absence of organic solvent, e.g., formamide, while high stringency hybridization can be obtained in the presence of at least about 35% formamide, and more preferably at least about 50% formamide. Stringent temperature conditions will ordinarily include temperatures of at least about 30° C., more preferably of at least about 37° C., and most preferably of at least about 42° C. Varying additional parameters, such as hybridization time, the concentration of detergent, e.g., sodium dodecyl sulfate (SDS), and the inclusion or exclusion of carrier DNA, are well known to those skilled in the art. Various levels of stringency are accomplished by combining these various conditions as needed. In a certain embodiment, hybridization will occur at 30° C. in 750 mM NaCl, 75 mM trisodium citrate, and 1% SDS. In a more preferred embodiment, hybridization will occur at 37° C. in 500 mM NaCl, 50 mM trisodium citrate, 1% SDS, 35% formamide, and 100 μg/ml denatured salmon sperm DNA (ssDNA). In a most preferred embodiment, hybridization will occur at 42° C. in 250 mM NaCl, 25 mM trisodium citrate, 1% SDS, 50% formamide, and 200 μg/ml ssDNA. Useful variations on these conditions will be readily apparent to those skilled in the art.

[0158] For most applications, washing steps that follow hybridization will also vary in stringency. Wash stringency conditions can be defined by salt concentration and by temperature. As above, wash stringency can be increased by decreasing salt concentration or by increasing temperature. For example, stringent salt concentration for the wash steps will preferably be less than about 30 mM NaCl and 3 mM trisodium citrate, and most preferably less than about 15 mM NaCl and 1.5 mM trisodium citrate. Stringent temperature conditions for the wash steps will ordinarily include a temperature of at least about 25° C., more preferably of at least about 42° C., and even more preferably of at least about 68° C. In a preferred embodiment, wash steps will occur at 25° C. in 30 mM NaCl, 3 mM trisodium citrate, and 0.1% SDS. In a more preferred embodiment, wash steps will occur at 42 C in 15 mM NaCl, 1.5 mM trisodium citrate, and 0.1% SDS. In a more preferred embodiment, wash steps will occur at 68° C. in 15 mM NaCl, 1.5 mM trisodium citrate, and 0.1% SDS. Additional variations on these conditions will be readily apparent to those skilled in the art. Hybridization techniques are well known to those skilled in the art and are described, for example, in Benton and Davis (Science 196:180, 1977); Grunstein and Hogness (Proc. Natl. Acad. Sci., USA 72:3961, 1975); Ausubel et al. (Current Protocols in Molecular Biology, Wiley Interscience, New York, 2001); Berger and Kimmel (Guide to Molecular Cloning Techniques, 1987, Academic Press, New York); and Sambrook et al., Molecular Cloning: A Laboratory Manual, Cold Spring Harbor Laboratory Press, New York.

[0159] By “split” is meant divided into two or more fragments.

[0160] A “split Cas9 protein” or “split Cas9” refers to a Cas9 protein that is provided as an N-terminal fragment and a C-terminal fragment encoded by two separate nucleotide sequences. The polypeptides corresponding to the N-terminal portion and the C-terminal portion of the Cas9 protein may be spliced to form a “reconstituted” Cas9 protein. In particular embodiments, the Cas9 protein is divided into two fragments within a disordered region of the protein, e.g., as described in Nishimasu et al., Cell, Volume 156, Issue 5, pp. 935-949, 2014, or as described in Jiang et al. (2016) Science 351: 867-871. PDB file: 5F9R, each of which is incorporated herein by reference. In some embodiments, the protein is divided into two fragments at any C, T, A, or S within a region of SpCas9 between about amino acids A292-G364, F445-K483, or E565-T637, or at corresponding positions in any other Cas9, Cas9 variant (e.g., nCas9, dCas9), or other napDNAbp. In some embodiments, protein is divided into two fragments at SpCas9 T310, T313, A456, S469, or C574. In some embodiments, the process of dividing the protein into two fragments is referred to as “splitting” the protein.

[0161] In other embodiments, the N-terminal portion of the Cas9 protein comprises amino acids 1-573 or 1-637 S. pyogenes Cas9 wild-type (SpCas9) (NCBI Reference Sequence: NC_002737.2, Uniprot Reference Sequence: Q99ZW2) and the C-terminal portion of the Cas9 protein comprises a portion of amino acids 574-1368 or 638-1368 of SpCas9 wild-type, or a corresponding position thereof.

[0162] The C-terminal portion of the split Cas9 can be joined with the N-terminal portion of the split Cas9 to form a complete Cas9 protein. In some embodiments, the C-terminal portion of the Cas9 protein starts from where the N-terminal portion of the Cas9 protein ends. As such, in some embodiments, the C-terminal portion of the split Cas9 comprises a portion of amino acids (551-651)-1368 of spCas9. “(551-651)-1368” means starting at an amino acid between amino acids 551-651 (inclusive) and ending at amino acid 1368. For example, the C-terminal portion of the split Cas9 may comprise a portion of any one of amino acid 551-1368, 552-1368, 553-1368, 554-1368, 555-1368, 556-1368, 557-1368, 558-1368, 559-1368, 560-1368, 561-1368, 562-1368, 563-1368, 564-1368, 565-1368, 566-1368, 567-1368, 568-1368, 569-1368, 570-1368, 571-1368, 572-1368, 573-1368, 574-1368, 575-1368, 576-1368, 577-1368, 578-1368, 579-1368, 580-1368, 581-1368, 582-1368, 583-1368, 584-1368, 585-1368, 586-1368, 587-1368, 588-1368, 589-1368, 590-1368, 591-1368, 592-1368, 593-1368, 594-1368, 595-1368, 596-1368, 597-1368, 598-1368, 599-1368, 600-1368, 601-1368, 602-1368, 603-1368, 604-1368, 605-1368, 606-1368, 607-1368, 608-1368, 609-1368, 610-1368, 611-1368, 612-1368, 613-1368, 614-1368, 615-1368, 616-1368, 617-1368, 618-1368, 619-1368, 620-1368, 621-1368, 622-1368, 623-1368, 624-1368, 625-1368, 626-1368, 627-1368, 628-1368, 629-1368, 630-1368, 631-1368, 632-1368, 633-1368, 634-1368, 635-1368, 636-1368, 637-1368, 638-1368, 639-1368, 640-1368, 641-1368, 642-1368, 643-1368, 644-1368, 645-1368, 646-1368, 647-1368, 648-1368, 649-1368, 650-1368, or 651-1368 of spCas9. In some embodiments, the C-terminal portion of the split Cas9 protein comprises a portion of amino acids 574-1368 or 638-1368 of SpCas9.

[0163] By “subject” is meant a mammal, including, but not limited to, a human or non-human mammal, such as a bovine, equine, canine, ovine, or feline. Subjects include livestock, domesticated animals raised to produce labor and to provide commodities, such as food, including without limitation, cattle, goats, chickens, horses, pigs, rabbits, and sheep.

[0164] By “substantially identical” is meant a polypeptide or nucleic acid molecule exhibiting at least 50% identity to a reference amino acid sequence (for example, any one of the amino acid sequences described herein) or nucleic acid sequence (for example, any one of the nucleic acid sequences described herein). Preferably, such a sequence is at least 60%, more preferably 80% or 85%, and more preferably 90%, 95% or even 99% identical at the amino acid level or nucleic acid to the sequence used for comparison.

[0165] Sequence identity is typically measured using sequence analysis software (for example, Sequence Analysis Software Package of the Genetics Computer Group, University of Wisconsin Biotechnology Center, 1710 University Avenue, Madison, Wis. 53705, BLAST, BESTFIT, COBALT, EMBOSS Needle, GAP, or PILEUP/PRETTYBOX programs). Such software matches identical or similar sequences by assigning degrees of homology to various substitutions, deletions, and/or other modifications. Conservative substitutions typically include substitutions within the following groups: glycine, alanine; valine, isoleucine, leucine; aspartic acid, glutamic acid, asparagine, glutamine; serine, threonine; lysine, arginine; and phenylalanine, tyrosine. In an exemplary approach to determining the degree of identity, a BLAST program may be used, with a probability score between e⁻³ and e⁻¹⁰⁰ indicating a closely related sequence. COBALT is used, for example, with the following parameters:

a) alignment parameters: Gap penalties-11, -1 and End-Gap penalties-5,-1,
b) CDD Parameters: Use RPS BLAST on; Blast E-value 0.003; Find Conserved columns and Recompute on, and
c) Query Clustering Parameters: Use query clusters on; Word Size 4; Max cluster distance 0.8; Alphabet Regular.
EMBOSS Needle is used, for example, with the following parameters:

### a) Matrix: BLOSUM62;

### b) GAP OPEN: 10;

### c) GAP EXTEND: 0.5;

[0166] d) OUTPUT FORMAT: pair;
e) END GAP PENALTY: false;

### f) END GAP OPEN: 10; and

### g) END GAP EXTEND: 0.5.

[0167] The term “target site” refers to a sequence within a nucleic acid molecule that is modified by a nucleobase editor. In one embodiment, the target site is deaminated by a deaminase or a fusion protein comprising a deaminase (e.g., an adenine deaminase).

[0168] As used herein, the terms “treat,” treating,” “treatment,” and the like refer to reducing or ameliorating a disorder and/or symptom(s) associated therewith or obtaining a desired pharmacologic and/or physiologic effect. It will be appreciated that, although not precluded, treating a disorder or condition does not require that the disorder, condition or symptoms associated therewith be completely eliminated. In some embodiments, the effect is therapeutic, i.e., without limitation, the effect partially or completely reduces, diminishes, abrogates, abates, alleviates, decreases the intensity of, or cures a disease and/or adverse symptom attributable to the disease. In some embodiments, the effect is preventative, i.e., the effect protects or prevents an occurrence or reoccurrence of a disease or condition. To this end, the presently disclosed methods comprise administering a therapeutically effective amount of a compositions as described herein.

[0169] By “uracil glycosylase inhibitor” of “UGI” is meant an agent that inhibits the uracil-excision repair system. In one embodiment, the agent is a protein or fragment thereof that binds a host uracil-DNA glycosylase and prevents removal of uracil residues from DNA. In an embodiment, a UGI is a protein, a fragment thereof, or a domain that is capable of inhibiting a uracil-DNA glycosylase base-excision repair enzyme. In some embodiments, a UGI domain comprises a wild-type UGI or a modified version thereof. In some embodiments, a UGI domain comprises a fragment of the exemplary amino acid sequence set forth below. In some embodiments, a UGI fragment comprises an amino acid sequence that comprises at least 60%, at least 65%, at least 70%, at least 75%, at least 80%, at least 85%, at least 90%, at least 95%, at least 96%, at least 97%, at least 98%, at least 99%, or 100% of the exemplary UGI sequence provided below. In some embodiments, a UGI comprises an amino acid sequence that is homologous to the exemplary UGI amino acid sequence or fragment thereof, as set forth below. In some embodiments, the UGI, or a portion thereof, is at least 70%, at least 75%, at least 80%, at least 85%, at least 90%, at least 95%, at least 96%, at least 97%, at least 98%, at least 99%, at least 99.5%, at least 99.9%, or 100% identical to a wild-type UGI or a UGI sequence, or portion thereof, as set forth below. An exemplary UGI comprises an amino acid sequence as follows:

>splP147391UNGL_BPPB2 Uracil-DNA
glycosylase inhibitor
MTNLSDIIEKETGKQLVIQESILMLPEEVEE
VIGNKPESDILVHTAYDESTDENVMLLTSDA
PEYKPWALVIODSNGENKIKML.

[0170] The term “vector” refers to a means of introducing a nucleic acid sequence into a cell, resulting in a transformed cell. Vectors include plasmids, transposons, phages, viruses, liposomes, and episome. “Expression vectors” are nucleic acid sequences comprising the nucleotide sequence to be expressed in the recipient cell. Expression vectors may include additional nucleic acid sequences to promote and/or facilitate the expression of the of the introduced sequence such as start, stop, enhancer, promoter, and secretion sequences.

[0171] The recitation of a listing of chemical groups in any definition of a variable herein includes definitions of that variable as any single group or combination of listed groups. The recitation of an embodiment for a variable or aspect herein includes that embodiment as any single embodiment or in combination with any other embodiments or portions thereof.

[0172] Any compositions or methods provided and described herein can be combined with one or more of any of the other compositions and methods provided and described herein.

[0173] DNA editing has emerged as a viable means to modify disease states by correcting pathogenic mutations at the genetic level. Until recently, all DNA editing platforms have functioned by inducing a DNA double strand break (DSB) at a specified genomic site and relying on endogenous DNA repair pathways to determine the product outcome in a semi-stochastic manner, resulting in complex populations of genetic products. Though precise, user-defined repair outcomes can be achieved through the homology directed repair (HDR) pathway, a number of challenges have prevented high efficiency repair using HDR in therapeutically-relevant cell types. In practice, this pathway is inefficient relative to the competing, error-prone non-homologous end joining pathway. Further, HDR is tightly restricted to the G1 and S phases of the cell cycle, preventing precise repair of DSBs in post-mitotic cells. As a result, it has proven difficult or impossible to alter genomic sequences in a user-defined, programmable manner with high efficiencies in these populations.

### Nucleobase Editor

[0174] Disclosed herein is a base editor or a nucleobase editor for editing, modifying or altering a target nucleotide sequence of a polynucleotide. Described herein is a nucleobase editor or a base editor comprising a polynucleotide programmable nucleotide binding domain and a nucleobase editing domain (e.g., adenosine deaminase). A polynucleotide programmable nucleotide binding domain, when in conjunction with a bound guide polynucleotide (e.g., gRNA), can specifically bind to a target polynucleotide sequence (i.e., via complementary base pairing between bases of the bound guide nucleic acid and bases of the target polynucleotide sequence) and thereby localize the base editor to the target nucleic acid sequence desired to be edited. In some embodiments, the target polynucleotide sequence comprises single-stranded DNA or double-stranded DNA. In some embodiments, the target polynucleotide sequence comprises RNA. In some embodiments, the target polynucleotide sequence comprises a DNA-RNA hybrid.

### Polynucleotide Programmable Nucleotide Binding Domain

[0175] It should be appreciated that polynucleotide programmable nucleotide binding domains can also include nucleic acid programmable proteins that bind RNA. For example, the polynucleotide programmable nucleotide binding domain can be associated with a nucleic acid that guides the polynucleotide programmable nucleotide binding domain to an RNA. Other nucleic acid programmable DNA binding proteins are also within the scope of this disclosure, though they are not specifically listed in this disclosure.

[0176] A polynucleotide programmable nucleotide binding domain of a base editor can itself comprise one or more domains. For example, a polynucleotide programmable nucleotide binding domain can comprise one or more nuclease domains. In some embodiments, the nuclease domain of a polynucleotide programmable nucleotide binding domain can comprise an endonuclease or an exonuclease. Herein the term “exonuclease” refers to a protein or polypeptide capable of digesting a nucleic acid (e.g., RNA or DNA) from free ends, and the term “endonuclease” refers to a protein or polypeptide capable of catalyzing (e.g., cleaving) internal regions in a nucleic acid (e.g., DNA or RNA). In some embodiments, an endonuclease can cleave a single strand of a double-stranded nucleic acid. In some embodiments, an endonuclease can cleave both strands of a double-stranded nucleic acid molecule. In some embodiments a polynucleotide programmable nucleotide binding domain can be a deoxyribonuclease. In some embodiments a polynucleotide programmable nucleotide binding domain can be a ribonuclease.

[0177] In some embodiments, a nuclease domain of a polynucleotide programmable nucleotide binding domain can cut zero, one, or two strands of a target polynucleotide. In some embodiments, the polynucleotide programmable nucleotide binding domain can comprise a nickase domain. Herein the term “nickase” refers to a polynucleotide programmable nucleotide binding domain comprising a nuclease domain that is capable of cleaving only one strand of the two strands in a duplexed nucleic acid molecule (e.g., DNA). In some embodiments, a nickase can be derived from a fully catalytically active (e.g., natural) form of a polynucleotide programmable nucleotide binding domain by introducing one or more mutations into the active polynucleotide programmable nucleotide binding domain. For example, where a polynucleotide programmable nucleotide binding domain comprises a nickase domain derived from Cas9, the Cas9-derived nickase domain can include a D10A mutation and a histidine at position 840. In such embodiments, the residue H840 retains catalytic activity and can thereby cleave a single strand of the nucleic acid duplex. In another example, a Cas9-derived nickase domain can comprise an H840A mutation, while the amino acid residue at position 10 remains a D. In some embodiments, a nickase can be derived from a fully catalytically active (e.g., natural) form of a polynucleotide programmable nucleotide binding domain by removing all or a portion of a nuclease domain that is not required for the nickase activity. For example, where a polynucleotide programmable nucleotide binding domain comprises a nickase domain derived from Cas9, the Cas9-derived nickase domain can comprise a deletion of all or a portion of the RuvC domain or the HNH domain.

[0178] The amino acid sequence of an exemplary catalytically active Cas9 is as follows:

MDKKYSIGLDIGTNSVGWAVITDEYKVPSKKFKVLGNTDRHSIKKNLIGAL
LFDSGETAEATRLKRTARRRYTRRKNRICYLQEIFSNEMAKVDDSFFHRLE
ESFLVEEDKKHERHPIFGNIVDEVAYHEKYPTIYHLRKKLVDSTDKADLRL
IYLALAHMIKFRGHFLIEGDLNPDNSDVDKLFIQLVQTYNQLFEENPINAS
GVDAKAILSARLSKSRRLENLIAQLPGEKKNGLFGNLIALSLGLTPNFKSN
FDLAEDAKLQLSKDTYDDDLDNLLAQIGDQYADLFLAAKNLSDAILLSDIL
RVNTEITKAPLSASMIKRYDEHHQDLTLLKALVRQQLPEKYKEIFFDQSKN
GYAGYIDGGASQEEFYKFIKPILEKMDGTEELLVKLNREDLLRKQRTFDNG
SIPHQIHLGELHAILRRQEDFYPFLKDNREKIEKILTFRIPYYVGPLARGN
SRFAWMTRKSEETITPWNFEEVVDKGASAQSFIERMTNFDKNLPNEKVLPK
HSLLYEYFTVYNELTKVKYVTEGMRKPAFLSGEQKKAIVDLLFKTNRKVTV
KQLKEDYFKKIECFDSVEISGVEDRFNASLGTYHDLLKIIKDKDFLDNEEN
EDILEDIVLTLTLFEDREMIEERLKTYAHLFDDKVMKQLKRRRYTGWGRLS
RKLINGIRDKQSGKTILDFLKSDGFANRNFMQLIHDDSLTFKEDIQKAQVS
GQGDSLHEHIANLAGSPAIKKGILQTVKVVDELVKVMGRHKPENIVIEMAR
ENQTTOKGQKNSRERMKRIEEGIKELGSQILKEHPVENTQLQNEKLYLYYL
QNGRDMYVDQELDINRLSDYDVDHIVPQSFLKDDSIDNKVLTRSDKNRGKS
DNVPSEEVVKKMKNYWRQLLNAKLITQRKFDNLTKAERGGLSELDKAGFIK
RQLVETRQITKHVAQILDSRMNTKYDENDKLIREVKVITLKSKLVSDFRKD
FQFYKVREINNYHHAHDAYLNAVVGTALIKKYPKLESEFVYGDYKVYDVRK
MIAKSEQEIGKATAKYFFYSNIMNFFKTEITLANGEIRKRPLIETNGETGE
IVWDKGRDFATVRKVLSMPQVNIVKKTEVQTGGFSKESILPKRNSDKLIAR
KKDWDPKKYGGFDSPTVAYSVLVVAKVEKGKSKKLKSVKELLGITIMERSS
FEKNPIDFLEAKGYKEVKKDLIIKLPKYSLFELENGRKRMLASAGELQKGN
ELALPSKYVNFLYLASHYEKLKGSPEDNEQKQLFVEQHKHYLDEIIEQISE
FSKRVILADANLDKVLSAYNKHRDKPIREQAENIIHLFTLTNLGAPAAFKY
FDTTIDRKRYTSTKEVLDATLIHQSITGLYETRIDLSQLGGD.

[0179] A base editor comprising a polynucleotide programmable nucleotide binding domain comprising a nickase domain is thus able to generate a single-strand DNA break (nick) at a specific polynucleotide target sequence (e.g., determined by the complementary sequence of a bound guide nucleic acid). In some embodiments, the strand of a nucleic acid duplex target polynucleotide sequence that is cleaved by a base editor comprising a nickase domain (e.g., Cas9-derived nickase domain) is the strand that is not edited by the base editor (i.e., the strand that is cleaved by the base editor is opposite to a strand comprising a base to be edited). In other embodiments, a base editor comprising a nickase domain (e.g., Cas9-derived nickase domain) can cleave the strand of a DNA molecule which is being targeted for editing. In such embodiments, the non-targeted strand is not cleaved.

[0180] Also provided herein are base editors comprising a polynucleotide programmable nucleotide binding domain which is catalytically dead (i.e., incapable of cleaving a target polynucleotide sequence). Herein the terms “catalytically dead” and “nuclease dead” are used interchangeably to refer to a polynucleotide programmable nucleotide binding domain which has one or more mutations and/or deletions resulting in its inability to cleave a strand of a nucleic acid. In some embodiments, a catalytically dead polynucleotide programmable nucleotide binding domain base editor can lack nuclease activity as a result of specific point mutations in one or more nuclease domains. For example, in the case of a base editor comprising a Cas9 domain, the Cas9 can comprise both a D10A mutation and an H840A mutation. Such mutations inactivate both nuclease domains, thereby resulting in the loss of nuclease activity. In other embodiments, a catalytically dead polynucleotide programmable nucleotide binding domain can comprise one or more deletions of all or a portion of a catalytic domain (e.g., RuvC1 and/or HNH domains). In further embodiments, a catalytically dead polynucleotide programmable nucleotide binding domain comprises a point mutation (e.g., D10A or H840A) as well as a deletion of all or a portion of a nuclease domain.

[0181] Also contemplated herein are mutations capable of generating a catalytically dead polynucleotide programmable nucleotide binding domain from a previously functional version of the polynucleotide programmable nucleotide binding domain. For example, in the case of catalytically dead Cas9 (“dCas9”), variants having mutations other than D10A and H840A are provided, which result in nuclease inactivated Cas9. Such mutations, by way of example, include other amino acid substitutions at D10 and H840, or other substitutions within the nuclease domains of Cas9 (e.g., substitutions in the HNH nuclease subdomain and/or the RuvC1 subdomain). Additional suitable nuclease-inactive dCas9 domains can be apparent to those of skill in the art based on this disclosure and knowledge in the field, and are within the scope of this disclosure. Such additional exemplary suitable nuclease-inactive Cas9 domains include, but are not limited to, D10A/H840A, D10A/D839A/H840A, and D10A/D839A/H840A/N₈₆₃A mutant domains (See, e.g., Prashant et al., CAS9 transcriptional activators for target specificity screening and paired nickases for cooperative genome engineering. Nature Biotechnology. 2013; 31(9): 833-838, the entire contents of which are incorporated herein by reference).

[0182] Non-limiting examples of a polynucleotide programmable nucleotide binding domain which can be incorporated into a base editor include a CRISPR protein-derived domain, a restriction nuclease, a meganuclease, TAL nuclease (TALEN), and a zinc finger nuclease (ZFN). In some embodiments, a base editor comprises a polynucleotide programmable nucleotide binding domain comprising a natural or modified protein or portion thereof which via a bound guide nucleic acid is capable of binding to a nucleic acid sequence during CRISPR (i.e., Clustered Regularly Interspaced Short Palindromic Repeats)-mediated modification of a nucleic acid. Such a protein is referred to herein as a “CRISPR protein.” Accordingly, disclosed herein is a base editor comprising a polynucleotide programmable nucleotide binding domain comprising all or a portion of a CRISPR protein (i.e. a base editor comprising as a domain all or a portion of a CRISPR protein, also referred to as a “CRISPR protein-derived domain” of the base editor). A CRISPR protein-derived domain incorporated into a base editor can be modified compared to a wild-type or natural version of the CRISPR protein. For example, as described below a CRISPR protein-derived domain can comprise one or more mutations, insertions, deletions, rearrangements and/or recombinations relative to a wild-type or natural version of the CRISPR protein.

[0183] CRISPR is an adaptive immune system that provides protection against mobile genetic elements (viruses, transposable elements and conjugative plasmids). CRISPR clusters contain spacers, sequences complementary to antecedent mobile elements, and target invading nucleic acids. CRISPR clusters are transcribed and processed into CRISPR RNA (crRNA). In type II CRISPR systems correct processing of pre-crRNA requires a trans-encoded small RNA (tracrRNA), endogenous ribonuclease 3 (rnc) and a Cas9 protein. The tracrRNA serves as a guide for ribonuclease 3-aided processing of pre-crRNA. Subsequently, Cas9/crRNA/tracrRNA endonucleolytically cleaves linear or circular dsDNA target complementary to the spacer. The target strand not complementary to crRNA is first cut endonucleolytically, and then trimmed 3′-5′ exonucleolytically. In nature, DNA-binding and cleavage typically requires protein and both RNAs. However, single guide RNAs (“sgRNA,” or simply “gRNA”) can be engineered so as to incorporate aspects of both the crRNA and tracrRNA into a single RNA species. See, e.g., Jinek M., Chylinski K., Fonfara I., Hauer M., Doudna J. A., Charpentier E. Science 337:816-821(2012), the entire contents of which is hereby incorporated by reference. Cas9 recognizes a short motif in the CRISPR repeat sequences (the PAM or protospacer adjacent motif) to help distinguish self versus non-self.

[0184] In some embodiments, the methods described herein can utilize an engineered Cas protein. A guide RNA (gRNA) is a short synthetic RNA composed of a scaffold sequence necessary for Cas-binding and a user-defined ˜20 nucleotide spacer that defines the genomic target to be modified. Thus, a skilled artisan can change the genomic target of the Cas protein specificity is partially determined by how specific the gRNA targeting sequence is for the genomic target compared to the rest of the genome.

[0185] In some embodiments, the gRNA scaffold sequence is as follows: GUUUUAGAGC UAGAAAUAGC AAGUUAAAAU AAGGCUAGUC CGUUAUCAAC UUGAAAAAGU GGCACCGAGU CGGUGCUUUU.

[0186] In some embodiments, a CRISPR protein-derived domain incorporated into a base editor is an endonuclease (e.g., deoxyribonuclease or ribonuclease) capable of binding a target polynucleotide when in conjunction with a bound guide nucleic acid. In some embodiments, a CRISPR protein-derived domain incorporated into a base editor is a nickase capable of binding a target polynucleotide when in conjunction with a bound guide nucleic acid. In some embodiments, a CRISPR protein-derived domain incorporated into a base editor is a catalytically dead domain capable of binding a target polynucleotide when in conjunction with a bound guide nucleic acid. In some embodiments, a target polynucleotide bound by a CRISPR protein derived domain of a base editor is DNA. In some embodiments, a target polynucleotide bound by a CRISPR protein-derived domain of a base editor is RNA.

[0187] Cas proteins that can be used herein include class 1 and class 2. Non-limiting examples of Cas proteins include Cas1, Cas1B, Cas2, Cas3, Cas4, Cas5, Cas5d, Cas5t, Cas5h, Cas5a, Cash, Cas7, Cas8, Cas9 (also known as Csn1 or Csx12), Cas10, Csy1, Csy2, Csy3, Csy4, Cse1, Cse2, Cse3, Cse4, Cse5e, Csc1, Csc2, Csa5, Csn1, Csn2, Csm1, Csm2, Csm3, Csm4, Csm5, Csm6, Cmr1, Cmr3, Cmr4, Cmr5, Cmr6, Csb1, Csb2, Csb3, Csx17, Csx14, Csx10, Csx16, CsaX, Csx3, Csx1, Csx1S, Csf1, Csf2, CsO, Csf4, Csd1, Csd2, Cst1, Cst2, Csh1, Csh2, Csa1, Csa2, Csa3, Csa4, Csa5, Cas12a/Cpf1, Cas12b/C2c1, Cas12c/C2c3, Cas12d/CasY, Cas12e/CasX, Cas12g, Cas12h, and Cas12i, CARF, DinG, homologues thereof, or modified versions thereof. An unmodified CRISPR enzyme can have DNA cleavage activity, such as Cas9, which has two functional endonuclease domains: RuvC and HNH. A CRISPR enzyme can direct cleavage of one or both strands at a target sequence, such as within a target sequence and/or within a complement of a target sequence. For example, a CRISPR enzyme can direct cleavage of one or both strands within about 1, 2, 3, 4, 5, 6, 7, 8, 9, 10, 15, 20, 25, 50, 100, 200, 500, or more base pairs from the first or last nucleotide of a target sequence.

[0188] A vector that encodes a CRISPR enzyme that is mutated to with respect, to a corresponding wild-type enzyme such that the mutated CRISPR enzyme lacks the ability to cleave one or both strands of a target polynucleotide containing a target sequence can be used. Cas9 can refer to a polypeptide with at least or at least about 50%, 60%, 70%, 80%, 90%, 91%, 92%, 93%, 94%, 95%, 96%, 97%, 98%, 99%, or 100% sequence identity and/or sequence homology to a wild-type exemplary Cas9 polypeptide (e.g., Cas9 from S. pyogenes). Cas9 can refer to a polypeptide with at most or at most about 50%, 60%, 70%, 80%, 90%, 91%, 92%, 93%, 94%, 95%, 96%, 97%, 98%, 99%, or 100% sequence identity and/or sequence homology to a wild-type exemplary Cas9 polypeptide (e.g., from S. pyogenes). Cas9 can refer to the wild-type or a modified form of the Cas9 protein that can comprise an amino acid change such as a deletion, insertion, substitution, variant, mutation, fusion, chimera, or any combination thereof.

[0189] In some embodiments, a CRISPR protein-derived domain of a base editor can include all or a portion of Cas9 from Corynebacterium ulcerans (NCBI Refs: NC_015683.1, NC_017317.1); Corynebacterium diphtheria (NCBI Refs: NC_016782.1, NC_016786.1); Spiroplasma syrphidicola (NCBI Ref: NC_021284.1); Prevotella intermedia (NCBI Ref: NC_017861.1); Spiroplasma taiwanense (NCBI Ref: NC_021846.1); Streptococcus iniae (NCBI Ref: NC_021314.1); Belliella baltica (NCBI Ref: NC_018010.1); Psychroflexus torquis (NCBI Ref: NC_018721.1); Streptococcus thermophilus (NCBI Ref: YP_820832.1); Listeria innocua (NCBI Ref: NP_472073.1); Campylobacter jejuni (NCBI Ref: YP_002344900.1); Neisseria meningitidis (NCBI Ref: YP_002342100.1), Streptococcus pyogenes, or Staphylococcus aureus.

### Cas9 Domains of Nucleobase Editors

[0190] Cas9 nuclease sequences and structures are well known to those of skill in the art (see, e.g., “Complete genome sequence of an MI strain of Streptococcus pyogenes.” Ferretti et al., Proc. Natl. Acad. Sci. U.S.A. 98:4658-4663(2001); “CRISPR RNA maturation by trans-encoded small RNA and host factor RNase III.” Deltcheva E., et al., Nature 471:602-607(2011); and “A programmable dual-RNA-guided DNA endonuclease in adaptive bacterial immunity.” Jinek M., et al., Science 337:816-821(2012), the entire contents of each of which are incorporated herein by reference). Cas9 orthologs have been described in various species, including, but not limited to, S. pyogenes and S. thermophilus. Additional suitable Cas9 nucleases and sequences will be apparent to those of skill in the art based on this disclosure, and such Cas9 nucleases and sequences include Cas9 sequences from the organisms and loci disclosed in Chylinski, Rhun, and Charpentier, “The tracrRNA and Cas9 families of type II CRISPR-Cas immunity systems” (2013) RNA Biology 10:5, 726-737; the entire contents of which are incorporated herein by reference.

[0191] In some aspects, a nucleic acid programmable DNA binding protein (napDNAbp) is a Cas9 domain. Non-limiting, exemplary Cas9 domains are provided herein. The Cas9 domain may be a nuclease active Cas9 domain, a nuclease inactive Cas9 domain (dCas9), or a Cas9 nickase (nCas9). In some embodiments, the Cas9 domain is a nuclease active domain. For example, the Cas9 domain may be a Cas9 domain that cuts both strands of a duplexed nucleic acid (e.g., both strands of a duplexed DNA molecule). In some embodiments, the Cas9 domain comprises any one of the amino acid sequences as set forth herein. In some embodiments the Cas9 domain comprises an amino acid sequence that is at least 60%, at least 65%, at least 70%, at least 75%, at least 80%, at least 85%, at least 90%, at least 95%, at least 96%, at least 97%, at least 98%, at least 99%, or at least 99.5% identical to any one of the amino acid sequences set forth herein. In some embodiments, the Cas9 domain comprises an amino acid sequence that has 1, 2, 3, 4, 5, 6, 7, 8, 9, 10, 11, 12, 13, 14, 15, 16, 17, 18, 19, 20, 21, 22, 21, 24, 25, 26, 27, 28, 29, 30, 31, 32, 33, 34, 35, 36, 37, 38, 39, 40, 41, 42, 43, 44, 45, 46, 47, 48, 49, 50 or more mutations compared to any one of the amino acid sequences set forth herein. In some embodiments, the Cas9 domain comprises an amino acid sequence that has at least 10, at least 15, at least 20, at least 30, at least 40, at least 50, at least 60, at least 70, at least 80, at least 90, at least 100, at least 150, at least 200, at least 250, at least 300, at least 350, at least 400, at least 500, at least 600, at least 700, at least 800, at least 900, at least 1000, at least 1100, or at least 1200 identical contiguous amino acid residues as compared to any one of the amino acid sequences set forth herein.

[0192] In some embodiments, proteins comprising fragments of Cas9 are provided. For example, in some embodiments, a protein comprises one of two Cas9 domains: (1) the gRNA binding domain of Cas9; or (2) the DNA cleavage domain of Cas9. In some embodiments, proteins comprising Cas9 or fragments thereof are referred to as “Cas9 variants.” A Cas9 variant shares homology to Cas9, or a fragment thereof. For example, a Cas9 variant is at least about 70% identical, at least about 80% identical, at least about 90% identical, at least about 95% identical, at least about 96% identical, at least about 97% identical, at least about 98% identical, at least about 99% identical, at least about 99.5% identical, or at least about 99.9% identical to wild type Cas9. In some embodiments, the Cas9 variant may have 1, 2, 3, 4, 5, 6, 7, 8, 9, 10, 11, 12, 13, 14, 15, 16, 17, 18, 19, 20, 21, 22, 21, 24, 25, 26, 27, 28, 29, 30, 31, 32, 33, 34, 35, 36, 37, 38, 39, 40, 41, 42, 43, 44, 45, 46, 47, 48, 49, 50 or more amino acid changes compared to wild type Cas9.

[0193] In some embodiments, the Cas9 variant comprises a fragment of Cas9 (e.g., a gRNA binding domain or a DNA-cleavage domain), such that the fragment is at least about 70% identical, at least about 80% identical, at least about 90% identical, at least about 95% identical, at least about 96% identical, at least about 97% identical, at least about 98% identical, at least about 99% identical, at least about 99.5% identical, or at least about 99.9% identical to the corresponding fragment of wild type Cas9. In some embodiments, the fragment is at least 30%, at least 35%, at least 40%, at least 45%, at least 50%, at least 55%, at least 60%, at least 65%, at least 70%, at least 75%, at least 80%, at least 85%, at least 90%, at least 95% identical, at least 96%, at least 97%, at least 98%, at least 99%, or at least 99.5% of the amino acid length of a corresponding wild type Cas9. In some embodiments, the fragment is at least 100 amino acids in length. In some embodiments, the fragment is at least 100, 150, 200, 250, 300, 350, 400, 450, 500, 550, 600, 650, 700, 750, 800, 850, 900, 950, 1000, 1050, 1100, 1150, 1200, 1250, or at least 1300 amino acids in length.

[0194] In some embodiments, Cas9 fusion proteins as provided herein comprise the full-length amino acid sequence of a Cas9 protein, e.g., one of the Cas9 sequences provided herein. In other embodiments, however, fusion proteins as provided herein do not comprise a full-length Cas9 sequence, but only one or more fragments thereof. Exemplary amino acid sequences of suitable Cas9 domains and Cas9 fragments are provided herein, and additional suitable sequences of Cas9 domains and fragments will be apparent to those of skill in the art.

[0195] In some embodiments, wild type Cas9 corresponds to Cas9 from Streptococcus pyogenes (NCBI Reference Sequence: NC_017053.1). Exemplary nucleotide and amino acid sequences are as follows:

ATGGATAAGAAATACTCAATAGGCTTAGATATCGGCACAAATAGCGTCGG
ATGGGCGGTGATCACTGATGATTATAAGGTTCCGTCTAAAAAGTTCAAGG
TTCTGGGAAATACAGACCGCCACAGTATCAAAAAAAATCTTATAGGGGCT
CTTTTATTTGGCAGTGGAGAGACAGCGGAAGCGACTCGTCTCAAACGGAC
AGCTCGTAGAAGGTATACACGTCGGAAGAATCGTATTTGTTATCTACAGG
AGATTTTTTCAAATGAGATGGCGAAAGTAGATGATAGTTTCTTTCATCGA
CTTGAAGAGTCTTTTTTGGTGGAAGAAGACAAGAAGCATGAACGTCATCC
TATTTTTGGAAATATAGTAGATGAAGTTGGTTATCATGAGAAATATCCAA
CTATCTATCATCTGCGAAAAAAATTGGCAGATTCTACTGATAAAGCGGAT
TTGCGCTTAATCTATTTGGCCTTAGCGCATATGATTAAGTTTCGTGGTCA
TTTTTTGATTGAGGGAGATTTAAATCCTGATAATAGTGATGTGGACAAAC
TATTTATCCAGTTGGTACAAATCTACAATCAATTATTTGAAGAAAACCCT
ATTAACGCAAGTAGAGTAGATGCTAAAGCGATTCTTTCTGCACGATTGAG
TAAATCAAGACGATTAGAAAATCTCATTGCTCAGCTCCCCGGTGAGAAGA
GAAATGGCTTGTTTGGGAATCTCATTGCTTTGTCATTGGGATTGACCCCT
AATTTTAAATCAAATTTTGATTTGGCAGAAGATGCTAAATTACAGCTTTC
AAAAGATACTTACGATGATGATTTAGATAATTTATTGGCGCAAATTGGAG
ATCAATATGCTGATTTGTTTTTGGCAGCTAAGAATTTATCAGATGCTATT
TTACTTTCAGATATCCTAAGAGTAAATAGTGAAATAACTAAGGCTCCCCT
ATCAGCTTCAATGATTAAGCGCTACGATGAACATCATCAAGACTTGACTC
TTTTAAAAGCTTTAGTTCGACAACAACTTCCAGAAAAGTATAAAGAAATC
TTTTTTGATCAATCAAAAAACGGATATGCAGGTTATATTGATGGGGGAGC
TAGCCAAGAAGAATTTTATAAATTTATCAAACCAATTTTAGAAAAAATGG
ATGGTACTGAGGAATTATTGGTGAAACTAAATCGTGAAGATTTGCTGCGC
AAGCAACGGACCTTTGACAACGGCTCTATTCCCCATCAAATTCACTTGGG
TGAGCTGCATGCTATTTTGAGAAGACAAGAAGACTTTTATCCATTTTTAA
AAGACAATCGTGAGAAGATTGAAAAAATCTTGACTTTTCGAATTCCTTAT
TATGTTGGTCCATTGGCGCGTGGCAATAGTCGTTTTGCATGGATGACTCG
GAAGTCTGAAGAAACAATTACCCCATGGAATTTTGAAGAAGTTGTCGATA
AAGGTGCTTCAGCTCAATCATTTATTGAACGCATGACAAACTTTGATAAA
AATCTTCCAAATGAAAAAGTACTACCAAAACATAGTTTGCTTTATGAGTA
TTTTACGGTTTATAACGAATTGACAAAGGTCAAATATGTTACTGAGGGAA
TGCGAAAACCAGCATTTCTTTCAGGTGAACAGAAGAAAGCCATTGTTGAT
TTACTCTTCAAAACAAATCGAAAAGTAACCGTTAAGCAATTAAAAGAAGA
TTATTTCAAAAAAATAGAATGTTTTGATAGTGTTGAAATTTCAGGAGTTG
AAGATAGATTTAATGCTTCATTAGGCGCCTACCATGATTTGCTAAAAATT
ATTAAAGATAAAGATTTTTTGGATAATGAAGAAAATGAAGATATCTTAGA
GGATATTGTTTTAACATTGACCTTATTTGAAGATAGGGGGATGATTGAGG
AAAGACTTAAAACATATGCTCACCTCTTTGATGATAAGGTGATGAAACAG
CTTAAACGTCGCCGTTATACTGGTTGGGGACGTTTGTCTCGAAAATTGAT
TAATGGTATTAGGGATAAGCAATCTGGCAAAACAATATTAGATTTTTTGA
AATCAGATGGTTTTGCCAATCGCAATTTTATGCAGCTGATCCATGATGAT
AGTTTGACATTTAAAGAAGATATTCAAAAAGCACAGGTGTCTGGACAAGG
CCATAGTTTACATGAACAGATTGCTAACTTAGCTGGCAGTCCTGCTATTA
AAAAAGGTATTTTACAGACTGTAAAAATTGTTGATGAACTGGTCAAAGTA
ATGGGGCATAAGCCAGAAAATATCGTTATTGAAATGGCACGTGAAAATCA
GACAACTCAAAAGGGCCAGAAAAATTCGCGAGAGCGTATGAAACGAATCG
AAGAAGGTATCAAAGAATTAGGAAGTCAGATTCTTAAAGAGCATCCTGTT
GAAAATACTCAATTGCAAAATGAAAAGCTCTATCTCTATTATCTACAAAA
TGGAAGAGACATGTATGTGGACCAAGAATTAGATATTAATCGTTTAAGTG
ATTATGATGTCGATCACATTGTTCCACAAAGTTTCATTAAAGACGATTCA
ATAGACAATAAGGTACTAACGCGTTCTGATAAAAATCGTGGTAAATCGGA
TAACGTTCCAAGTGAAGAAGTAGTCAAAAAGATGAAAAACTATTGGAGAC
AACTTCTAAACGCCAAGTTAATCACTCAACGTAAGTTTGATAATTTAACG
AAAGCTGAACGTGGAGGTTTGAGTGAACTTGATAAAGCTGGTTTTATCAA
ACGCCAATTGGTTGAAACTCGCCAAATCACTAAGCATGTGGCACAAATTT
TGGATAGTCGCATGAATACTAAATACGATGAAAATGATAAACTTATTCGA
GAGGTTAAAGTGATTAGCTTAAAATCTAAATTAGTTTCTGACTTCCGAAA
AGATTTCCAATTCTATAAAGTAGGTGAGATTAACAATTACCATCATGCCC
ATGATGCGTATCTAAATGCCGTCGTTGGAACTGCTTTGATTAAGAAATAT
CCAAAACTTGAATCGGAGTTTGTCTATGGTGATTATAAAGTTTATGATGT
TCGTAAAATGATTGCTAAGTCTGAGCAAGAAATAGGCAAAGCAACCGCAA
AATATTTCTTTTACTCTAATATCATGAACTTCTTCAAAACAGAAATTACA
CTTGCAAATGGAGAGATTCGCAAACGCCCTCTAATCGAAACTAATGGGGA
AACTGGAGAAATTGTCTGGGATAAAGGGCGAGATTTTGCCACAGTGCGCA
AAGTATTGTCCATGCCCCAAGTCAATATTGTCAAGAAAACAGAAGTACAG
ACAGGCGGATTCTCCAAGGAGTCAATTTTACCAAAAAGAAATTCGGACAA
GCTTATTGCTCGTAAAAAAGACTGGGATCCAAAAAAATATGGTGGTTTTG
ATAGTCCAACGGTAGCTTATTCAGTCCTAGTGGTTGCTAAGGTGGAAAAA
GGGAAATCGAAGAAGTTAAAATCCGTTAAAGAGTTACTAGGGATCACAAT
TATGGAAAGAAGTTCCTTTGAAAAAAATCCGATTGACTTTTTAGAAGCTA
AAGGATATAAGGAAGTTAAAAAAGACTTAATCATTAAACTACCTAAATAT
AGTCTTTTTGAGTTAGAAAACGGTCGTAAACGGATGCTGGCTAGTGCCGG
AGAATTACAAAAAGGAAATGAGCTGGCTCTGCCAAGCAAATATGTGAATT
TTTTATATTTAGCTAGTCATTATGAAAAGTTGAAGGGTAGTCCAGAAGAT
AACGAACAAAAACAATTGTTTGTGGAGCAGCATAAGCATTATTTAGATGA
GATTATTGAGCAAATCAGTGAATTTTCTAAGCGTGTTATTTTAGGAGATG
CCAATTTAGATAAAGTTCTTAGTGCATATAACAAACATAGAGACAAACCA
ATACGTGAACAAGCAGAAAATATTATTCATTTATTTACGTTGACGAATCT
TGGAGCTCCCGCTGCTTTTAAATATTTTGATACAACAATTGATCGTAAAC
GATATACGTCTACAAAAGAAGTTTTAGATGCCACTCTTATCCATCAATCC
ATCACTGGTCTTTATGAAACACGCATTGATTTGAGTCAGCTAGGAGGTGA
CTGA
MDKKYSIGLDIGTNSVGWAVITDDYKVPSKKFKVLGNTDRHSIKKNLIGAL
LFGSGETAEATRLKRTARRRYTRRKNRICYLQEIFSNEMAKVDDSFFHRLE
ESFLVEEDKKHERHPIFGNIVDEVAYHEKYPTIYHLRKKLADSTDKADLRL
IYLALAHMIKFRGHFLIEGDLNPDNSDVDKLFIQLVQIYNQLFEENPINAS
RVDAKAILSARLSKSRRLENLIAQLPGEKRNGLFGNLIALSLGLTPNFKSN
FDLAEDAKLQLSKDTYDDDLDNLLAQIGDQYADLFLAAKNLSDAILLSDIL
RVNSEITKAPLSASMIKRYDEHHQDLTLLKALVRQQLPEKYKEIFFDQSKN
GYAGYIDGGASQEEFYKFIKPILEKMDGTEELLVKLNREDLLRKQRTFDNG
SIPHQIHLGELHAILRRQEDFYPFLKDNREKIEKILTFRIPYYVGPLARGN
SRFAWMTRKSEETITPWNFEEVVDKGASAQSFIERMTNFDKNLPNEKVLPK
HSLLYEYFTVYNELTKVKYVTEGMRKPAFLSGEQKKAIVDLLFKTNRKVTV
KQLKEDYFKKIECFDSVEISGVEDRFNASLGAYHDLLKIIKDKDFLDNEEN
EDILEDIVLTLTLFEDRGMIEERLKTYAHLFDDKVMKQLKRRRYTGWGRLS
RKLINGIRDKQSGKTILDFLKSDGFANRNFMQLIHDDSLTFKEDIQKAQVS
GQGHSLHEQIANLAGSPAIKKGILQTVKIVDELVKVMGHKPENIVIEMARE
NQTTQKGQKNSRERMKRIEEGIKELGSQILKEHPVENTQLQNEKLYLYYLQ
NGRDMYVDQELDINRLSDYDVDHIVPQSFIKDDSIDNKVLTRSDKNRGKSD
NVPSEEVVKKMKNYWRQLLNAKLITQRKFDNLTKAERGGLSELDKAGFIKR
QLVETRQITKHVAQILDSRMNTKYDENDKLIREVKVITLKSKLVSDFRKDF
QFYKVREINNYHHAHDAYLNAVVGTALIKKYPKLESEFVYGDYKVYDVRKM
IAKSEQEIGKATAKYFFYSNIMNFFKTEITLANGEIRKRPLIETNGETGEI
VWDKGRDFATVRKVLSMPQVNIVKKTEVQTGGFSKESILPKRNSDKLIARK
KDWDPKKYGGFDSPTVAYSVLVVAKVEKGKSKKLKSVKELLGITIMERSSF
EKNPIDFLEAKGYKEVKKDLIIKLPKYSLEELENGRKRMLASAGELQKGNE
LALPSKYVNELYLASHYEKLKGSPEDNEQKQLFVEQHKHYLDEIIEQISEF
SKRVILADANLDKVLSAYNKHRDKPIREQAENIIHLFTLTNLGAPAAFKYF
DTTIDRKRYTSTKEVLDATLIHQSITGLYETRIDLSQLGGD
(single underline: HNH domain; double underline:
RuvC domain)

[0196] In some embodiments, wild type Cas9 corresponds to, or comprises the following nucleotide and/or amino acid sequences:

ATGGATAAAAAGTATTCTATTGGTTTAGACATCGGCACTAATTCCGTTGG
ATGGGCTGTCATAACCGATGAATACAAAGTACCTTCAAAGAAATTTAAGG
TGTTGGGGAACACAGACCGTCATTCGATTAAAAAGAATCTTATCGGTGCC
CTCCTATTCGATAGTGGCGAAACGGCAGAGGCGACTCGCCTGAAAGGAAC
CGCTCGGAGAAGGTATACACGTCGCAAGAACCGAATATGTTACTTACAAG
AAATTTTTAGCAATGAGATGGCCAAAGTTGACGATTCTTTCTTTCACCGT
TTGGAAGAGTCCTTCCTTGTCGAAGAGGACAAGAAACATGAACGGCACCC
CATCTTTGGAAACATAGTAGATGAGGTGGCATATCATGAAAAGTACCCAA
CGATTTATCACCTCAGAAAAAAGCTAGTTGACTCAACTGATAAAGCGGAC
CTGAGGTTAATCTACTTGGCTCTTGCCCATATGATAAAGTTCCGTGGGCA
CTTTCTCATTGAGGGTGATCTAAATCCGGACAACTCGGATGTCGACAAAC
TGTTCATCCAGTTAGTACAAACCTATAATCAGTTGTTTGAAGAGAACCCT
ATAAATGCAAGTGGCGTGGATGCGAAGGCTATTCTTAGCGCCCGCCTCTC
TAAATCCCGACGGCTAGAAAACCTGATCGCACAATTACCCGGAGAGAAGA
AAAATGGGTTGTTCGGTAACCTTATAGCGCTCTCACTAGGCCTGACACCA
AATTTTAAGTCGAACTTCGACTTAGCTGAAGATGCCAAATTGCAGCTTAG
TAAGGACACGTACGATGACGATCTCGACAATCTACTGGCACAAATTGGAG
ATCAGTATGCGGACTTATTTTTGGCTGCCAAAAACCTTAGCGATGCAATC
CTCCTATCTGACATACTGAGAGTTAATACTGAGATTACCAAGGCGCCGTT
ATCCGCTTCAATGATCAAAAGGTACGATGAACATCACCAAGACTTGACAC
TTCTCAAGGCCCTAGTCCGTCAGCAACTGCCTGAGAAATATAAGGAAATA
TTCTTTGATCAGTCGAAAAACGGGTACGCAGGTTATATTGACGGCGGAGC
GAGTCAAGAGGAATTCTACAAGTTTATCAAACCCATATTAGAGAAGATGG
ATGGGACGGAAGAGTTGCTTGTAAAACTCAATCGCGAAGATCTACTGCGA
AAGCAGCGGACTTTCGACAACGGTAGCATTCCACATCAAATCCACTTAGG
CGAATTGCATGCTATACTTAGAAGGCAGGAGGATTTTTATCCGTTCCTCA
AAGACAATCGTGAAAAGATTGAGAAAATCCTAACCTTTCGCATACCTTAC
TATGTGGGACCCCTGGCCCGAGGGAACTCTCGGTTCGCATGGATGACAAG
AAAGTCCGAAGAAACGATTACTCCATGGAATTTTGAGGAAGTTGTCGATA
AAGGTGCGTCAGCTCAATCGTTCATCGAGAGGATGACCAACTTTGACAAG
AATTTACCGAACGAAAAAGTATTGCCTAAGCACAGTTTACTTTACGAGTA
TTTCACAGTGTACAATGAACTCACGAAAGTTAAGTATGTCACTGAGGGCA
TGCGTAAACCCGCCTTTCTAAGCGGAGAACAGAAGAAAGCAATAGTAGAT
CTGTTATTCAAGACCAACCGCAAAGTGACAGTTAAGCAATTGAAAGAGGA
CTACTTTAAGAAAATTGAATGCTTCGATTCTGTCGAGATCTCCGGGGTAG
AAGATCGATTTAATGCGTCACTTGGTACGTATCATGACCTCCTAAAGATA
ATTAAAGATAAGGACTTCCTGGATAACGAAGAGAATGAAGATATCTTAGA
AGATATAGTGTTGACTCTTACCCTCTTTGAAGATCGGGAAATGATTGAGG
AAAGACTAAAAACATACGCTCACCTGTTCGACGATAAGGTTATGAAACAG
TTAAAGAGGCGTCGCTATACGGGCTGGGGACGATTGTCGCGGAAACTTAT
CAACGGGATAAGAGACAAGCAAAGTGGTAAAACTATTCTCGATTTTCTAA
AGAGCGACGGCTTCGCCAATAGGAACTTTATGCAGCTGATCCATGATGAC
TCTTTAACCTTCAAAGAGGATATACAAAAGGCACAGGTTTCCGGACAAGG
GGACTCATTGCACGAACATATTGCGAATCTTGCTGGTTCGCCAGCCATCA
AAAAGGGCATACTCCAGACAGTCAAAGTAGTGGATGAGCTAGTTAAGGTC
ATGGGACGTCACAAACCGGAAAACATTGTAATCGAGATGGCACGCGAAAA
TCAAACGACTCAGAAGGGGCAAAAAAACAGTCGAGAGCGGATGAAGAGAA
TAGAAGAGGGTATTAAAGAACTGGGCAGCCAGATCTTAAAGGAGCATCCT
GTGGAAAATACCCAATTGCAGAACGAGAAACTTTACCTCTATTACCTACA
AAATGGAAGGGACATGTATGTTGATCAGGAACTGGACATAAACCGTTTAT
CTGATTACGACGTCGATCACATTGTACCCCAATCCTTTTTGAAGGACGAT
TCAATCGACAATAAAGTGCTTACACGCTCGGATAAGAACCGAGGGAAAAG
TGACAATGTTCCAAGCGAGGAAGTCGTAAAGAAAATGAAGAACTATTGGC
GGCAGCTCCTAAATGCGAAACTGATAACGCAAAGAAAGTTCGATAACTTA
ACTAAAGCTGAGAGGGGTGGCTTGTCTGAACTTGACAAGGCCGGATTTAT
TAAACGTCAGCTCGTGGAAACCCGCCAAATCACAAAGCATGTTGCACAGA
TACTAGATTCCCGAATGAATACGAAATACGACGAGAACGATAAGCTGATT
CGGGAAGTCAAAGTAATCACTTTAAAGTCAAAATTGGTGTCGGACTTCAG
AAAGGATTTTCAATTCTATAAAGTTAGGGAGATAAATAACTACCACCATG
CGCACGACGCTTATCTTAATGCCGTCGTAGGGACCGCACTCATTAAGAAA
TACCCGAAGCTAGAAAGTGAGTTTGTGTATGGTGATTAGAAAGTTTATGA
CGTCCGTAAGATGATCGCGAAAAGCGAACAGGAGATAGGCAAGGCTACAG
CCAAATACTTCTTTTATTCTAACATTATGAATTTCTTTAAGACGGAAATC
ACTCTGGCAAACGGAGAGATACGCAAACGACCTTTAATTGAAACCAATGG
GGAGACAGGTGAAATCGTATGGGATAAGGGCCGGGACTTCGCGACGGTGA
GAAAAGTTTTGTCCATGCCCCAAGTCAACATAGTAAAGAAAACTGAGGTG
CAGACCGGAGGGTTTTCAAAGGAATCGATTCTTCCAAAAAGGAATAGTGA
TAAGCTCATCGCTCGTAAAAAGGACTGGGACCCGAAAAAGTACGGTGGCT
TCGATAGCCCTACAGTTGCCTATTCTGTCCTAGTAGTGGCAAAAGTTGAG
AAGGGAAAATCCAAGAAACTGAAGTCAGTCAAAGAATTATTGGGGATAAC
GATTATGGAGCGCTCGTCTTTTGAAAAGAACCCCATCGACTTCCTTGAGG
CGAAAGGTTACAAGGAAGTAAAAAAGGATCTCATAATTAAACTACCAAAG
TATAGTCTGTTTGAGTTAGAAAATGGCCGAAAACGGATGTTGGCTAGCGC
CGGAGAGCTTCAAAAGGGGAACGAACTCGCACTACCGTCTAAATACGTGA
ATTTCCTGTATTTAGCGTCCCATTACGAGAAGTTGAAAGGTTCACCTGAA
GATAACGAACAGAAGCAACTTTTTGTTGAGCAGCACAAACATTATCTCGA
CGAAATCATAGAGCAAATTTCGGAATTCAGTAAGAGAGTCATCCTAGCTG
ATGCCAATCTGGACAAAGTATTAAGCGCATACAACAAGCACAGGGATAAA
CCCATACGTGAGCAGGCGGAAAATATTATCCATTTGTTTACTCTTACCAA
CCTCGGCGCTCCAGCCGCATTCAAGTATTTTGACACAACGATAGATCGCA
AACGATACACTTCTACCAAGGAGGTGCTAGACGCGACACTGATTCACCAA
TCCATCACGGGATTATATGAAACTCGGATAGATTTGTCACAGCTTGGGGG
TGACGGATCCCCCAAGAAGAAGAGGAAAGTCTCGAGCGACTACAAAGACC
ATGACGGTGATTATAAAGATCATGACATCGATTACAAGGATGACGATGAC
AAGGCTGCAGGA
MDKKYSIGLAIGTNSVGWAVITDEYKVPSKKFKVLGNTDRHSIKKNLIGA
LLFDSGETAEATRLKRTARRRYTRRKNRICYLQEIFSNEMAKVDDSFFHR
LEESFLVEEDKKHERHPIFGNIVDEVAYHEKYPTIYHLRKKLVDSTDKAD
LRLIYLALAHMIKFRGHFLIEGDLNPDNSDVDKLFIQLVQTYNQLFEENP
INASGVDAKAILSARLSKSRRLENLIAQLPGEKKNGLFGNLIALSLGLTP
NFKSNFDLAEDAKLQLSKDTYDDDLDNLLAQIGDQYADLFLAAKNLSDAI
LLSDILRVNTEITKAPLSASMIKRYDEHHQDLTLLKALVRQQLPEKYKEI
FFDQSKNGYAGYIDGGASQEEFYKFIKPILEKMDGTEELLVKLNREDLLR
KQRTFDNGSIPHQIHLGELHAILRRQEDFYPFLKDNREKIEKILTFRIPY
YVGPLARGNSRFAWMTRKSEETITPWNFEEVVDKGASAQSFIERMTNFDK
NLPNEKVLPKHSLLYEYFTVYNELTKVKYVTEGMRKPAFLSGEQKKAIVD
LLFKTNRKVTVKQLKEDYFKKIECFDSVEISGVEDRFNASLGTYHDLLKI
IKDKDFLDNEENEDILEDIVLTLTLFEDREMIEERLKTYAHLFDDKVMKQ
LKRRRYTGWGRLSRKLINGIRDKQSGKTILDFLKSDGFANRNFMQLIHDD
SLTFKEDIQKAQVSGQGDSLHEHIANLAGSPAIKKGILQTVKVVDELVKV
MGRHKPENIVIEMARENQTTQKGQKNSRERMKRIEEGIKELGSQILKEHP
VENTQLQNEKLYLYYLQNGRDMYVDQELDINRLSDYDVDHIVPQSFLKDD
SIDNKVLTRSDKNRGKSDNVPSEEVVKKMKNYWRQLLNAKLITQRKFDNL
TKAERGGLSELDKAGFIKRQLVETRQITKHVAQILDSRMNTKYDENDKLI
REVKVITLKSKLVSDFRKDFQFYKVREINNYHHAHDAYLNAVVGTALIKK
YPKLESEFVYGDYKVYDVRKMIAKSEQEIGKATAKYFFYSNIMNFFKTEI
TLANGEIRKRPLIETNGETGEIVWDKGRDFATVRKVLSMPQVNIVKKTEV
QTGGFSKESILPKRNSDKLIARKKDWDPKKYGGFDSPTVAYSVLVVAKVE
KGKSKKLKSVKELLGITIMERSSFEKNPIDFLEAKGYKEVKKDLIIKLPK
YSLFELENGRKRMLASAGELQKGNELALPSKYVNFLYLASHYEKLKGSPE
DNEQKQLFVEQHKHYLDEIIEQISEFSKRVILADANLDKVLSAYNKHRDK
PIREQAENIIHLFTLTNLGAPAAFKYFDTTIDRKRYTSTKEVLDATLIHQ
SITGLYETRIDLSQLGGD
(single underline: HNH domain; double underline:
RuvC domain).

[0197] In some embodiments, wild type Cas9 corresponds to Cas9 from Streptococcus pyogenes (NCBI Reference Sequence: NC_002737.2 (nucleotide sequence as follows); and Uniprot Reference Sequence: Q99ZW2 (amino acid sequence as follows):

ATGGATAAGAAATACTCAATAGGCTTAGATATCGGCACAAATAGCGTCGG
ATGGGCGGTGATCACTGATGAATATAAGGTTCCGTCTAAAAAGTTCAAGG
TTCTGGGAAATACAGACCGCCACAGTATCAAAAAAAATCTTATAGGGGCT
CTTTTATTTGACAGTGGAGAGACAGCGGAAGCGACTCGTCTCAAACGGAC
AGCTCGTAGAAGGTATACACGTCGGAAGAATCGTATTTGTTATCTACAGG
AGATTTTTTCAAATGAGATGGCGAAAGTAGATGATAGTTTCTTTCATCGA
CTTGAAGAGTCTTTTTTGGTGGAAGAAGACAAGAAGCATGAACGTCATCC
TATTTTTGGAAATATAGTAGATGAAGTTGGTTATCATGAGAAATATCCAA
CTATCTATCATCTGCGAAAAAAATTGGTAGATTCTACTGATAAAGCGGAT
TTGCGCTTAATCTATTTGGCCTTAGCGCATATGATTAAGTTTCGTGGTCA
TTTTTTGATTGAGGGAGATTTAAATCCTGATAATAGTGATGTGGACAAAC
TATTTATCCAGTTGGTACAAACCTACAATCAATTATTTGAAGAAAACCCT
ATTAACGCAAGTGGAGTAGATGCTAAAGCGATTCTTTCTGCACGATTGAG
TAAATCAAGACGATTAGAAAATCTCATTGCTCAGCTCCCCGGTGAGAAGA
AAAATGGCTTATTTGGGAATCTCATTGCTTTGTCATTGGGTTTGACCCCT
AATTTTAAATCAAATTTTGATTTGGCAGAAGATGCTAAATTACAGCTTTC
AAAAGATACTTAGGATGATGATTTAGATAATTTATTGGCGCAAATTGGAG
ATCAATATGCTGATTTGTTTTTGGCAGCTAAGAATTTATCAGATGCTATT
TTACTTTCAGATATCCTAAGAGTAAATACTGAAATAACTAAGGCTCCCCT
ATCAGCTTCAATGATTAAACGCTACGATGAACATCATCAAGACTTGACTC
TTTTAAAAGCTTTAGTTCGACAACAACTTCCAGAAAAGTATAAAGAAATC
TTTTTTGATCAATCAAAAAACGGATATGCAGGTTATATTGATGGGGGAGC
TAGCCAAGAAGAATTTTATAAATTTATCAAACCAATTTTAGAAAAAATGG
ATGGTACTGAGGAATTATTGGTGAAACTAAATCGTGAAGATTTGCTGCGC
AAGCAACGGACCTTTGACAACGGCTCTATTCCCCATCAAATTCACTTGGG
TGAGCTGCATGCTATTTTGAGAAGACAAGAAGACTTTTATCCATTTTTAA
AAGACAATCGTGAGAAGATTGAAAAAATCTTGACTTTTCGAATTCCTTAT
TATGTTGGTCCATTGGCGCGTGGCAATAGTCGTTTTGCATGGATGACTCG
GAAGTCTGAAGAAACAATTACCCCATGGAATTTTGAAGAAGTTGTCGATA
AAGGTGCTTCAGCTCAATCATTTATTGAACGCATGACAAACTTTGATAAA
AATCTTCCAAATGAAAAAGTACTACCAAAACATAGTTTGCTTTATGAGTA
TTTTACGGTTTATAACGAATTGACAAAGGTCAAATATGTTACTGAAGGAA
TGCGAAAACCAGCATTTCTTTCAGGTGAACAGAAGAAAGCCATTGTTGAT
TTACTCTTCAAAACAAATCGAAAAGTAACCGTTAAGCAATTAAAAGAAGA
TTATTTCAAAAAAATAGAATGTTTTGATAGTGTTGAAATTTCAGGAGTTG
AAGATAGATTTAATGCTTCATTAGGTACCTACCATGATTTGCTAAAAATT
ATTAAAGATAAAGATTTTTTGGATAATGAAGAAAATGAAGATATCTTAGA
GGATATTGTTTTAACATTGACCTTATTTGAAGATAGGGAGATGATTGAGG
AAAGACTTAAAACATATGCTCACCTCTTTGATGATAAGGTGATGAAACAG
CTTAAACGTCGCCGTTATACTGGTTGGGGACGTTTGTCTCGAAAATTGAT
TAATGGTATTAGGGATAAGCAATCTGGCAAAACAATATTAGATTTTTTGA
AATCAGATGGTTTTGCCAATCGCAATTTTATGCAGCTGATCCATGATGAT
AGTTTGACATTTAAAGAAGACATTCAAAAAGCACAAGTGTCTGGACAAGG
CGATAGTTTACATGAACATATTGCAAATTTAGCTGGTAGCCCTGCTATTA
AAAAAGGTATTTTACAGACTGTAAAAGTTGTTGATGAATTGGTCAAAGTA
ATGGGGCGGCATAAGCCAGAAAATATCGTTATTGAAATGGCACGTGAAAA
TCAGACAACTCAAAAGGGCCAGAAAAATTCGCGAGAGCGTATGAAACGAA
TCGAAGAAGGTATCAAAGAATTAGGAAGTCAGATTCTTAAAGAGCATCCT
GTTGAAAATACTCAATTGCAAAATGAAAAGCTCTATCTCTATTATCTCCA
AAATGGAAGAGACATGTATGTGGACCAAGAATTAGATATTAATCGTTTAA
GTGATTATGATGTCGATCACATTGTTCCACAAAGTTTCCTTAAAGACGAT
TCAATAGACAATAAGGTCTTAACGCGTTCTGATAAAAATCGTGGTAAATC
GGATAACGTTCCAAGTGAAGAAGTAGTCAAAAAGATGAAAAACTATTGGA
GACAACTTCTAAACGCCAAGTTAATCACTCAACGTAAGTTTGATAATTTA
ACGAAAGCTGAACGTGGAGGTTTGAGTGAACTTGATAAAGCTGGTTTTAT
CAAACGCCAATTGGTTGAAACTCGCCAAATCACTAAGCATGTGGCACAAA
TTTTGGATAGTCGCATGAATACTAAATACGATGAAAATGATAAACTTATT
CGAGAGGTTAAAGTGATTACCTTAAAATCTAAATTAGTTTCTGACTTCCG
AAAAGATTTCCAATTCTATAAAGTACGTGAGATTAACAATTACCATCATG
CCCATGATGCGTATCTAAATGCCGTCGTTGGAACTGCTTTGATTAAGAAA
TATCCAAAACTTGAATCGGAGTTTGTCTATGGTGATTATAAAGTTTATGA
TGTTCGTAAAATGATTGCTAAGTCTGAGCAAGAAATAGGCAAAGCAACCG
CAAAATATTTCTTTTAGTCTAATATCATGAACTTCTTCAAAACAGAAATT
ACACTTGCAAATGGAGAGATTCGCAAACGCCCTCTAATCGAAACTAATGG
GGAAACTGGAGAAATTGTCTGGGATAAAGGGCGAGATTTTGCCACAGTGC
GCAAAGTATTGTCCATGCCCCAAGTCAATATTGTCAAGAAAACAGAAGTA
CAGACAGGCGGATTCTCCAAGGAGTCAATTTTACCAAAAAGAAATTCGGA
CAAGCTTATTGCTCGTAAAAAAGACTGGGATCCAAAAAAATATGGTGGTT
TTGATAGTCCAACGGTAGCTTATTCAGTCCTAGTGGTTGCTAAGGTGGAA
AAAGGGAAATCGAAGAAGTTAAAATCCGTTAAAGAGTTACTAGGGATCAC
AATTATGGAAAGAAGTTCCTTTGAAAAAAATCCGATTGACTTTTTAGAAG
CTAAAGGATATAAGGAAGTTAAAAAAGACTTAATCATTAAACTACCTAAA
TATAGTCTTTTTGAGTTAGAAAACGGTCGTAAACGGATGCTGGCTAGTGC
CGGAGAATTACAAAAAGGAAATGAGCTGGCTCTGCCAAGCAAATATGTGA
ATTTTTTATATTTAGCTAGTCATTATGAAAAGTTGAAGGGTAGTCCAGAA
GATAACGAACAAAAACAATTGTTTGTGGAGCAGCATAAGCATTATTTAGA
TGAGATTATTGAGCAAATCAGTGAATTTTCTAAGCGTGTTATTTTAGCAG
ATGCCAATTTAGATAAAGTTCTTAGTGCATATAACAAACATAGAGACAAA
CCAATACGTGAACAAGCAGAAAATATTATTCATTTATTTACGTTGACGAA
TCTTGGAGCTCCCGCTGCTTTTAAATATTTTGATACAACAATTGATCGTA
AACGATATACGTCTACAAAAGAAGTTTTAGATGCCACTCTTATCCATCAA
TCCATCACTGGTCTTTATGAAACACGCATTGATTTGAGTCAGCTAGGAGG
TGACTGA
MDKKYSIGLDIGTNSVGWAVITDEYKVPSKKFKVLGNTDRHSIKKNLIGA
LLFDSGETAEATRLKRTARRRYTRRKNRICYLQEIFSNEMAKVDDSFFHR
LEESFLVEEDKKHERHPIFGNIVDEVAYHEKYPTIYHLRKKLVDSTDKAD
LRLIYLALAHMIKFRGHFLIEGDLNPDNSDVDKLFIQLVQTYNQLFEENP
INASGVDAKAILSARLSKSRRLENLIAQLPGEKKNGLFGNLIALSLGLTP
NFKSNFDLAEDAKLQLSKDTYDDDLDNLLAQIGDQYADLFLAAKNLSDAI
LLSDILRVNTEITKAPLSASMIKRYDEHHQDLTLLKALVRQQLPEKYKEI
FFDQSKNGYAGYIDGGASQEEFYKFIKPILEKMDGTEELLVKLNREDLLR
KQRTFDNGSIPHQIHLGELHAILRRQEDFYPFLKDNREKIEKILTFRIPY
YVGPLARGNSRFAWMTRKSEETITPWNFEEVVDKGASAQSFIERMTNFDK
NLPNEKVLPKHSLLYEYFTVYNELTKVKYVTEGMRKPAFLSGEQKKAIVD
LLFKTNRKVTVKQLKEDYFKKIECFDSVEISGVEDRFNASLGTYHDLLKI
IKDKDFLDNEENEDILEDIVLTLTLFEDREMIEERLKTYAHLFDDKVMKQ
LKRRRYTGWGRLSRKLINGIRDKQSGKTILDFLKSDGFANRNFMQLIHDD
SLTFKEDIQKAQVSGQGDSLHEHIANLAGSPAIKKGILQTVKVVDELVKV
MGRHKPENIVIEMARENQTTQKGQKNSRERMKRIEEGIKELGSQILKEHP
VENTQLQNEKLYLYYLQNGRDMYVDQELDINRLSDYDVDHIVPQSFLKDD
SIDNKVLTRSDKNRGKSDNVPSEEVVKKMKNYWRQLLNAKLITQRKFDNL
TKAERGGLSELDKAGFIKRQLVETRQITKHVAQILDSRMNTKYDENDKLI
REVKVITLKSKLVSDFRKDFQFYKVREINNYHHAHDAYLNAVVGTALIKK
YPKLESEFVYGDYKVYDVRKMIAKSEQEIGKATAKYEEYSNIMNFFKTEI
TLANGEIRKRPLIETNGETGEIVWDKGRDFATVRKVLSMPQVNIVKKTEV
QTGGFSKESILPKRNSDKLIARKKDWDPKKYGGFDSPTVAYSVLVVAKVE
KGKSKKLKSVKELLGITIMERSSFEKNPIDFLEAKGYKEVKKDLIIKLPK
YSLFELENGRKRMLASAGELQKGNELALPSKYVNELYLASHYEKLKGSPE
DNEQKQLFVEQHKHYLDEIIEQISEFSKRVILADANLDKVLSAYNKHRDK
PIREQAENIIHLFTLTNLGAPAAFKYFDTTIDRKRYTSTKEVLDATLIHQ
SITGLYETRIDLSQLGGD
(single underline: HNH domain; double underline:
RuvC domain).

[0198] In some embodiments, Cas9 refers to Cas9 from: Corynebacterium ulcerans (NCBI Refs: NC_015683.1, NC_017317.1); Corynebacterium diphtheria (NCBI Refs: NC_016782.1, NC_016786.1); Spiroplasma syrphidicola (NCBI Ref: NC_021284.1); Prevotella intermedia (NCBI Ref: NC_017861.1); Spiroplasma taiwanense (NCBI Ref: NC_021846.1); Streptococcus iniae (NCBI Ref: NC_021314.1); Belliella baltica (NCBI Ref: NC_018010.1); Psychroflexus torquisI (NCBI Ref: NC_018721.1); Streptococcus thermophilus (NCBI Ref: YP_820832.1), Listeria innocua (NCBI Ref: NP_472073.1), Campylobacter jejuni (NCBI Ref: YP_002344900.1) or Neisseria meningitidis (NCBI Ref: YP_002342100.1) or to a Cas9 from any other organism.

[0199] It should be appreciated that additional Cas9 proteins (e.g., a nuclease dead Cas9 (dCas9), a Cas9 nickase (nCas9), or a nuclease active Cas9), including variants and homologs thereof, are within the scope of this disclosure. Exemplary Cas9 proteins include, without limitation, those provided below. In some embodiments, the Cas9 protein is a nuclease active Cas9. In some embodiments, the Cas9 protein is a nuclease dead Cas9 (dCas9). In some embodiments, the Cas9 protein is a Cas9 nickase (nCas9).

[0200] In some embodiments, the Cas9 domain is a nuclease-inactive Cas9 domain (dCas9). For example, the dCas9 domain may bind to a duplexed nucleic acid molecule (e.g., via a gRNA molecule) without cleaving either strand of the duplexed nucleic acid molecule. A nuclease-inactivated Cas9 protein may interchangeably be referred to as a “dCas9” protein (for nuclease-“dead” Cas9) or catalytically inactive Cas9. Methods for generating a Cas9 protein (or a fragment thereof) having an inactive DNA cleavage domain are known (See, e.g., Jinek et al., Science. 337:816-821(2012); Qi et al., “Repurposing CRISPR as an RNA-Guided Platform for Sequence-Specific Control of Gene Expression” (2013) Cell. 28; 152(5):1173-83, the entire contents of each of which are incorporated herein by reference). For example, the DNA cleavage domain of Cas9 is known to include two subdomains, the HNH nuclease subdomain and the RuvC1 subdomain. The HNH subdomain cleaves the strand complementary to the gRNA, whereas the RuvC1 subdomain cleaves the non-complementary strand. Mutations within these subdomains can silence the nuclease activity of Cas9. For example, the mutations D10A and H840A completely inactivate the nuclease activity of S. pyogenes Cas9 (Jinek et al., Science. 337:816-821(2012); Qi et al., Cell. 28; 152(5):1173-83 (2013)).

[0201] In some embodiments, dCas9 corresponds to, or comprises in part or in whole, a Cas9 amino acid sequence having one or more mutations that inactivate the Cas9 nuclease activity. In some embodiments, the nuclease-inactive dCas9 domain comprises a D10X mutation and a H840X mutation of the amino acid sequence set forth herein, or a corresponding mutation in any of the amino acid sequences provided herein, wherein X is any amino acid change. In some embodiments, the nuclease-inactive dCas9 domain comprises a D10A mutation and a H840A mutation of the amino acid sequence set forth herein, or a corresponding mutation in any of the amino acid sequences provided herein. In some embodiments, a nuclease-inactive Cas9 domain comprises the amino acid sequence set forth in Cloning vector pPlatTET-gRNA2 (Accession No. BAV54124). In some embodiments, the dCas9 comprises the amino acid sequence of dCas9 (D10A and H840A):

MDKKYSIGLAIGTNSVGWAVITDEYKVPSKKFKVLGNTDRHSIKKNLIGA
LLFDSGETAEATRLKRTARRRYTRRKNRICYLQEIFSNEMAKVDDSFFHR
LEESFLVEEDKKHERHPIFGNIVDEVAYHEKYPTIYHLRKKLVDSTDKAD
LRLIYLALAHMIKFRGHFLIEGDLNPDNSDVDKLFIQLVQTYNQLFEENP
INASGVDAKAILSARLSKSRRLENLIAQLPGEKKNGLFGNLIALSLGLTP
NFKSNFDLAEDAKLQLSKDTYDDDLDNLLAQIGDQYADLFLAAKNLSDAI
LLSDILRVNTEITKAPLSASMIKRYDEHHQDLTLLKALVRQQLPEKYKEI
FFDQSKNGYAGYIDGGASQEEFYKFIKPILEKMDGTEELLVKLNREDLLR
KQRTFDNGSIPHQIHLGELHAILRRQEDFYPFLKDNREKIEKILTFRIPY
YVGPLARGNSRFAWMTRKSEETITPWNFEEVVDKGASAQSFIERMTNFDK
NLPNEKVLPKHSLLYEYFTVYNELTKVKYVTEGMRKPAFLSGEQKKAIVD
LLFKTNRKVTVKQLKEDYFKKIECFDSVEISGVEDRFNASLGTYHDLLKI
IKDKDFLDNEENEDILEDIVLTLTLFEDREMIEERLKTYAHLFDDKVMKQ
LKRRRYTGWGRLSRKLINGIRDKQSGKTILDFLKSDGFANRNFMQLIHDD
SLTFKEDIQKAQVSGQGDSLHEHIANLAGSPAIKKGILQTVKVVDELVKV
MGRHKPENIVIEMARENQTTQKGQKNSRERMKRIEEGIKELGSQILKEHP
VENTQLQNEKLYLYYLQNGRDMYVDQELDINRLSDYDVDAIVPQSFLKDD
SIDNKVLTRSDKNRGKSDNVPSEEVVKKMKNYWRQLLNAKLITQRKFDNL
TKAERGGLSELDKAGFIKRQLVETRQITKHVAQILDSRMNTKYDENDKLI
REVKVITLKSKLVSDFRKDFQFYKVREINNYHHAHDAYLNAVVGTALIKK
YPKLESEFVYGDYKVYDVRKMIAKSEQEIGKATAKYFFYSNIMNFFKTEI
TLANGEIRKRPLIETNGETGEIVWDKGRDFATVRKVLSMPQVNIVKKTEV
QTGGFSKESILPKRNSDKLIARKKDWDPKKYGGFDSPTVAYSVLVVAKVE
KGKSKKLKSVKELLGITIMERSSFEKNPIDFLEAKGYKEVKKDLIIKLPK
YSLFELENGRKRMLASAGELQKGNELALPSKYVNELYLASHYEKLKGSPE
DNEQKQLFVEQHKHYLDEIIEQISEFSKRVILADANLDKVLSAYNKHRDK
PIREQAENIIHLFTLTNLGAPAAFKYFDTTIDRKRYTSTKEVLDATLIHQ
SITGLYETRIDLSQLGGD
(single underline: HNH domain; double underline:
RuvC domain).

[0202] In some embodiments, the amino acid sequence of an exemplary catalytically inactive Cas9 (dCas9) is as follows:

MDKKYSIGLAIGTNSVGWAVITDEYKVPSKKFKVLGNTDRHSIKKNLIGA
LLFDSGETAEATRLKRTARRRYTRRKNRICYLQEIFSNEMAKVDDSFFHR
LEESFLVEEDKKHERHPIFGNIVDEVAYHEKYPTIYHLRKKLVDSTDKAD
LRLIYLALAHMIKFRGHFLIEGDLNPDNSDVDKLFIQLVQTYNQLFEENP
INASGVDAKAILSARLSKSRRLENLIAQLPGEKKNGLFGNLIALSLGLTP
NFKSNFDLAEDAKLQLSKDTYDDDLDNLLAQIGDQYADLFLAAKNLSDAI
LLSDILRVNTEITKAPLSASMIKRYDEHHQDLTLLKALVRQQLPEKYKEI
FFDQSKNGYAGYIDGGASQEEFYKFIKPILEKMDGTEELLVKLNREDLLR
KQRTFDNGSIPHQIHLGELHAILRRQEDFYPFLKDNREKIEKILTFRIPY
YVGPLARGNSRFAWMTRKSEETITPWNFEEVVDKGASAQSFIERMTNFDK
NLPNEKVLPKHSLLYEYFTVYNELTKVKYVTEGMRKPAFLSGEQKKAIVD
LLFKTNRKVTVKQLKEDYFKKIECFDSVEISGVEDRFNASLGTYHDLLKI
IKDKDFLDNEENEDILEDIVLTLTLFEDREMIEERLKTYAHLFDDKVMKQ
LKRRRYTGWGRLSRKLINGIRDKQSGKTILDFLKSDGFANRNFMQLIHDD
SLTFKEDIQKAQVSGQGDSLHEHIANLAGSPAIKKGILQTVKVVDELVKV
MGRHKPENIVIEMARENQTTQKGQKNSRERMKRIEEGIKELGSQILKEHP
VENTQLQNEKLYLYYLQNGRDMYVDQELDINRLSDYDVDAIVPQSFLKDD
SIDNKVLTRSDKNRGKSDNVPSEEVVKKMKNYWRQLLNAKLITQRKFDNL
TKAERGGLSELDKAGFIKRQLVETRQITKHVAQILDSRMNTKYDENDKLI
REVKVITLKSKLVSDFRKDFQFYKVREINNYHHAHDAYLNAVVGTALIKK
YPKLESEFVYGDYKVYDVRKMIAKSEQEIGKATAKYFFYSNIMNFFKTEI
TLANGEIRKRPLIETNGETGEIVWDKGRDFATVRKVLSMPQVNIVKKTEV
QTGGFSKESILPKRNSDKLIARKKDWDPKKYGGFDSPTVAYSVLVVAKVE
KGKSKKLKSVKELLGITIMERSSFEKNPIDFLEAKGYKEVKKDLIIKLPK
YSLFELENGRKRMLASAGELQKGNELALPSKYVNFLYLASHYEKLKGSPE
DNEQKQLFVEQHKHYLDEIIEQISEFSKRVILADANLDKVLSAYNKHRDK
PIREQAENIIHLFTLTNLGAPAAFKYFDTTIDRKRYTSTKEVLDATLIHQ
SITGLYETRIDLSQLGGD
(see, e.g., Qi et al., “Repurposing CRISPR as an
RNA-guided platform for sequence-specific control
of gene expression.” Cell. 2013; 152(5): 1173-83,
the entire contents of which are incorporated
herein by reference).

[0203] In some embodiments, the amino acid sequence of an exemplary catalytically inactive Cas9 (dCas9) is as follows:

MDKKYSIGLAIGTNSVGWAVITDEYKVPSKKFKVLGNTDRHSIKKNLIGA
LLFDSGETAEATRLKRTARRRYTRRKNRICYLQEIFSNEMAKVDDSFFHR
LEESFLVEEDKKHERHPIFGNIVDEVAYHEKYPTIYHLRKKLVDSTDKAD
LRLIYLALAHMIKFRGHFLIEGDLNPDNSDVDKLFIQLVQTYNQLFEENP
INASGVDAKAILSARLSKSRRLENLIAQLPGEKKNGLFGNLIALSLGLTP
NFKSNFDLAEDAKLQLSKDTYDDDLDNLLAQIGDQYADLFLAAKNLSDAI
LLSDILRVNTEITKAPLSASMIKRYDEHHQDLTLLKALVRQQLPEKYKEI
FFDQSKNGYAGYIDGGASQEEFYKFIKPILEKMDGTEELLVKLNREDLLR
KQRTFDNGSIPHQIHLGELHAILRRQEDFYPFLKDNREKIEKILTFRIPY
YVGPLARGNSRFAWMTRKSEETITPWNFEEVVDKGASAQSFIERMTNFDK
NLPNEKVLPKHSLLYEYFTVYNELTKVKYVTEGMRKPAFLSGEQKKAIVD
LLFKTNRKVTVKQLKEDYFKKIECFDSVEISGVEDRFNASLGTYHDLLKI
IKDKDFLDNEENEDILEDIVLTLTLFEDREMIEERLKTYAHLFDDKVMKQ
LKRRRYTGWGRLSRKLINGIRDKQSGKTILDFLKSDGFANRNFMQLIHDD
SLTFKEDIQKAQVSGQGDSLHEHIANLAGSPAIKKGILQTVKVVDELVKV
MGRHKPENIVIEMARENQTTQKGQKNSRERMKRIEEGIKELGSQILKEHP
VENTQLQNEKLYLYYLQNGRDMYVDQELDINRLSDYDVDAIVPQSFLKDD
SIDNKVLTRSDKNRGKSDNVPSEEVVKKMKNYWRQLLNAKLITQRKFDNL
TKAERGGLSELDKAGFIKRQLVETRQITKHVAQILDSRMNTKYDENDKLI
REVKVITLKSKLVSDFRKDFQFYKVREINNYHHAHDAYLNAVVGTALIKK
YPKLESEFVYGDYKVYDVRKMIAKSEQEIGKATAKYFFYSNIMNFFKTEI
TLANGEIRKRPLIETNGETGEIVWDKGRDFATVRKVLSMPQVNIVKKTEV
QTGGFSKESILPKRNSDKLIARKKDWDPKKYGGFDSPTVAYSVLVVAKVE
KGKSKKLKSVKELLGITIMERSSFEKNPIDFLEAKGYKEVKKDLIIKLPK
YSLFELENGRKRMLASAGELQKGNELALPSKYVNFLYLASHYEKLKGSPE
DNEQKQLFVEQHKHYLDEIIEQISEFSKRVILADANLDKVLSAYNKHRDK
PIREQAENIIHLFTLTNLGAPAAFKYFDTTIDRKRYTSTKEVLDATLIHQ
SITGLYETRIDLSQLGGD

[0204] In some embodiments, the Cas9 domain comprises a D10A mutation, while the residue at position 840 remains a histidine in the amino acid sequence provided above, or at corresponding positions in any of the amino acid sequences provided herein. In other embodiments, dCas9 variants having mutations other than D10A and H840A are provided, which, e.g., result in nuclease inactivated Cas9 (dCas9). Such mutations, by way of example, include other amino acid substitutions at D10 and H840, or other substitutions within the nuclease domains of Cas9 (e.g., substitutions in the HNH nuclease subdomain and/or the RuvC1 subdomain). In some embodiments, variants or homologues of dCas9 are provided which are at least about 70% identical, at least about 80% identical, at least about 90% identical, at least about 95% identical, at least about 98% identical, at least about 99% identical, at least about 99.5% identical, or at least about 99.9% identical. In some embodiments, variants of dCas9 are provided having amino acid sequences which are shorter, or longer, by about 5 amino acids, by about 10 amino acids, by about 15 amino acids, by about 20 amino acids, by about 25 amino acids, by about 30 amino acids, by about 40 amino acids, by about 50 amino acids, by about 75 amino acids, by about 100 amino acids or more.

[0205] Additional suitable nuclease-inactive dCas9 domains will be apparent to those of skill in the art based on this disclosure and knowledge in the field, and are within the scope of this disclosure. Such additional exemplary suitable nuclease-inactive Cas9 domains include, but are not limited to, D10A/H840A, D10A/D839A/H840A, and D10A/D839A/H840A/N863A mutant domains (See, e.g., Prashant et al., CAS9 transcriptional activators for target specificity screening and paired nickases for cooperative genome engineering. Nature Biotechnology. 2013; 31(9): 833-838, the entire contents of which are incorporated herein by reference).

[0206] In some embodiments, a Cas9 nuclease has an inactive (e.g., an inactivated) DNA cleavage domain, that is, the Cas9 is a nickase, referred to as an “nCas9” protein (for “nickase” Cas9). In some embodiments, the Cas9 domain is a Cas9 nickase. The Cas9 nickase may be a Cas9 protein that is capable of cleaving only one strand of a duplexed nucleic acid molecule (e.g., a duplexed DNA molecule). In some embodiments, the Cas9 nickase cleaves the target strand of a duplexed nucleic acid molecule, meaning that the Cas9 nickase cleaves the strand that is base paired to (complementary to) a gRNA (e.g., an sgRNA) that is bound to the Cas9. In some embodiments, a Cas9 nickase comprises a D10A mutation and has a histidine at position 840. In some embodiments, the Cas9 nickase cleaves the non-target, non-base-edited strand of a duplexed nucleic acid molecule, meaning that the Cas9 nickase cleaves the strand that is not base paired to a gRNA (e.g., an sgRNA) that is bound to the Cas9. In some embodiments, a Cas9 nickase comprises an H840A mutation and has an aspartic acid residue at position 10, or a corresponding mutation. In some embodiments, the Cas9 nickase comprises an amino acid sequence that is at least 60%, at least 65%, at least 70%, at least 75%, at least 80%, at least 85%, at least 90%, at least 95%, at least 96%, at least 97%, at least 98%, at least 99%, or at least 99.5% identical to any one of the Cas9 nickases provided herein. Additional suitable Cas9 nickases will be apparent to those of skill in the art based on this disclosure and knowledge in the field, and are within the scope of this disclosure.

[0207] The amino acid sequence of an exemplary catalytically Cas9 nickase (nCas9) is as follows:

MDKKYSIGLAIGTNSVGWAVITDEYKVPSKKFKVLGNTDRHSIKKNLIGA
LLFDSGETAEATRLKRTARRRYTRRKNRICYLQEIFSNEMAKVDDSFFHR
LEESFLVEEDKKHERHPIFGNIVDEVAYHEKYPTIYHLRKKLVDSTDKAD
LRLIYLALAHMIKFRGHFLIEGDLNPDNSDVDKLEIQLVQTYNQLFEENP
INASGVDAKAILSARLSKSRRLENLIAQLPGEKKNGLFGNLIALSLGLTP
NFKSNFDLAEDAKLQLSKDTYDDDLDNLLAQIGDQYADLFLAAKNLSDAI
LLSDILRVNTEITKAPLSASMIKRYDEHHQDLTLLKALVRQQLPEKYKEI
FFDQSKNGYAGYIDGGASQEEFYKFIKPILEKMDGTEELLVKLNREDLLR
KQRTFDNGSIPHQIHLGELHAILRRQEDFYPFLKDNREKIEKILTFRIPY
YVGPLARGNSRFAWMTRKSEETITPWNFEEVVDKGASAQSFIERMTNFDK
NLPNEKVLPKHSLLYEYFTVYNELTKVKYVTEGMRKPAFLSGEQKKAIVD
LLFKTNRKVTVKQLKEDYFKKIECFDSVEISGVEDRFNASLGTYHDLLKI
IKDKDFLDNEENEDILEDIVLTLTLFEDREMIEERLKTYAHLFDDKVMKQ
LKRRRYTGWGRLSRKLINGIRDKQSGKTILDFLKSDGFANRNFMQLIHDD
SLTFKEDIQKAQVSGQGDSLHEHIANLAGSPAIKKGILQTVKVVDELVKV
MGRHKPENIVIEMARENQTTQKGQKNSRERMKRIEEGIKELGSQILKEHP
VENTQLQNEKLYLYYLQNGRDMYVDQELDINRLSDYDVDHIVPQSFLKDD
SIDNKVLTRSDKNRGKSDNVPSEEVVKKMKNYWRQLLNAKLITQRKFDNL
TKAERGGLSELDKAGFIKRQLVETRQITKHVAQILDSRMNTKYDENDKLI
REVKVITLKSKLVSDFRKDFQFYKVREINNYHHAHDAYLNAVVGTALIKK
YPKLESEFVYGDYKVYDVRKMIAKSEQEIGKATAKYFFYSNIMNFFKTEI
TLANGEIRKRPLIETNGETGEIVWDKGRDFATVRKVLSMPQVNIVKKTEV
QTGGFSKESILPKRNSDKLIARKKDWDPKKYGGFDSPTVAYSVLVVAKVE
KGKSKKLKSVKELLGITIMERSSFEKNPIDFLEAKGYKEVKKDLIIKLPK
YSLFELENGRKRMLASAGELQKGNELALPSKYVNFLYLASHYEKLKGSPE
DNEQKQLFVEQHKHYLDEIIEQISEFSKRVILADANLDKVLSAYNKHRDK
PIREQAENIIHLFTLTNLGAPAAFKYFDTTIDRKRYTSTKEVLDATLIHQ
SITGLYETRIDLSQLGGD

[0208] In some embodiments, Cas9 refers to a Cas9 from archaea (e.g., nanoarchaea), which constitute a domain and kingdom of single-celled prokaryotic microbes. In some embodiments, a nucleic acid programmable DNA binding protein may be a CasX or CasY protein, which have been described in, for example, Burstein et al., “New CRISPR-Cas systems from uncultivated microbes.” Cell Res. 2017 Feb. 21. doi: 10.1038/cr.2017.21, the entire contents of which is hereby incorporated by reference. Using genome-resolved metagenomics, a number of CRISPR-Cas systems were identified, including the first reported Cas9 in the archaeal domain of life. This divergent Cas9 protein was found in little-studied nanoarchaea as part of an active CRISPR-Cas system. In bacteria, two previously unknown systems were discovered, CRISPR-CasX and CRISPR-CasY, which are among the most compact systems yet discovered. In some embodiments, in a base editor system described herein Cas9 is replaced by CasX, or a variant of CasX. In some embodiments, in a base editor system described herein Cas9 is replaced by CasY, or a variant of CasY. It should be appreciated that other RNA-guided DNA binding proteins may be used as a nucleic acid programmable DNA binding protein (napDNAbp), and are within the scope of this disclosure.

[0209] In some embodiments, the nucleic acid programmable DNA binding protein (napDNAbp) of any of the fusion proteins provided herein may be a CasX or CasY protein. In some embodiments, the napDNAbp is a CasX protein. In some embodiments, the napDNAbp is a CasY protein. In some embodiments, the napDNAbp comprises an amino acid sequence that is at least 85%, at least 90%, at least 91%, at least 92%, at least 93%, at least 94%, at least 95%, at least 96%, at least 97%, at least 98%, at least 99%, or at least 99.5% identical to a naturally-occurring CasX or CasY protein. In some embodiments, the napDNAbp is a naturally-occurring CasX or CasY protein. In some embodiments, the napDNAbp comprises an amino acid sequence that is at least 85%, at least 90%, at least 91%, at least 92%, at least 93%, at least 94%, at least 95%, at least 96%, at least 97%, at least 98%, at least 99%, or at ease 99.5% identical to any CasX or CasY protein described herein. It should be appreciated that CasX and CasY from other bacterial species may also be used in accordance with the present disclosure.

[0210] An exemplary CasX ((uniprot.org/uniprot/FONN87; uniprot.org/uniprot/FONH53) tr|FONN87|FONN87 SULIHCRISPR-associatedCasxprotein OS=Sulfolobus islandicus (strain HVE10/4) GN=SiH_0402 PE=4 SV=1) amino acid sequence is as follows:

MEVPLYNIFGDNYIIQVATEAENSTIYNNKVEIDDEELRNVLNLAYKIAK
NNEDAAAERRGKAKKKKGEEGETTTSNIILPLSGNDKNPWTETLKCYNFP
TTVALSEVFKNFSQVKECEEVSAPSFVKPEFYEFGRSPGMVERTRRVKLE
VEPHYLIIAAAGWVLTRLGKAKVSEGDYVGVNVFTPTRGILYSLIQNVNG
IVPGIKPETAFGLWIARKVVSSVTNPNVSVVRIYTISDAVGQNPTTINGG
FSIDLTKLLEKRYLLSERLEAIARNALSISSNMRERYIVLANYIYEYLTG
SKRLEDLLYFANRDLIMNLNSDDGKVRDLKLISAYVNGELIRGEG

[0211] An exemplary CasX (>tr|F0NH53|FONH53_SULIR CRISPR associated protein, Casx OS=Sulfolobus islandicus (strain REY15A) GN=SiRe_0771 PE=4 SV=1) amino acid sequence is as follows:

MEVPLYNIFGDNYIIQVATEAENSTIYNNKVEIDDEELRNVLNLAYKIAK
NNEDAAAERRGKAKKKKGEEGETTTSNIILPLSGNDKNPWTETLKCYNFP
TTVALSEVFKNFSQVKECEEVSAPSFVKPEFYKFGRSPGMVERTRRVKLE
VEPHYLIMAAAGWVLTRLGKAKVSEGDYVGVNVFTPTRGILYSLIQNVNG
IVPGIKPETAFGLWIARKVVSSVTNPNVSVVSIYTISDAVGQNPTTINGG
FSIDLTKLLEKRDLLSERLEAIARNALSISSNMRERYIVLANYIYEYLTG
SKRLEDLLYFANRDLIMNLNSDDGKVRDLKLISAYVNGELIRGEG

[0212] Deltaproteobacteria CasX

MEKRINKIRKKLSADNATKPVSRSGPMKTLLVRVMTDDLKKRLEKRRKKP
EVMPQVISNNAANNLRMLLDDYTKMKEAILQVYWQEFKDDHVGLMCKFAQ
PASKKIDQNKLKPEMDEKGNLTTAGFACSQCGQPLFVYKLEQVSEKGKAY
TNYFGRCNVAEHEKLILLAQLKPVKDSDEAVTYSLGKFGQRALDFYSIHV
TKESTHPVKPLAQIAGNRYASGPVGKALSDACMGTIASFLSKYQDIIIEH
QKVVKGNQKRLESLRELAGKENLEYPSVTLPPQPHTKEGVDfAYNEVIAR
VRMWVNLNLWQKLKLSRDDAKPLLRLKGFPSFPVVERRENEVDWWNTINE
VKKLIDAKRDMGRVFWSGVTAEKRNTILEGYNYLPNENDHKKREGSLENP
KKPAKRQFGDLLLYLEKKYAGDWGKVFDEAWERIDKKIAGLTSHIEREEA
RNAEDAQSKAVLTDWLRAKASFVLERLKEMDEKEFYACEIQLQKWYGDLR
GNPFAVEAENRVVDISGFSIGSDGHSIQYRNLLAWKYLENGKREFYLLMN
YGKKGRIRFTDGTDIKKSGKWQGLLYGGGKAKVIDLTFDPDDEQLIILPL
AFGTRQGREFIWNDLLSLETGLIKLANGRVIEKTIYNKKIGRDEPALFVA
LTFERREVVDPSNIKPVNLIGVARGENIPAVIALTDPEGCPLPEFKDSSG
GPTDILRIGEGYKEKQRAIQAAKEVEQRRAGGYSRKFASKSRNLADDMVR
NSARDLFYHAVTHDAVLVFANLSRGFGRQGKRTFMTERQYTKMEDWLTAK
LAYEGLTSKTYLSKTLAQYTSKTCSNCGFTITYADMDVMLVRLKKTSDGW
ATTLNNKELKAEYQITYYNRYKRQTVEKELSAELDRLSEESGNNDISKWT
KGRRDEALFLLKKRFSHRPVQEQFVCLDCGHEVHAAEQAALNIARSWLFL
NSNSTEFKSYKSGKQPFVGAWQAFYKRRLKEVWKPNA

[0213] An exemplary CasY ((ncbi.nlm.nih.gov/protein/APG80656.1)>APG80656.1 CRISPR-associated protein CasY [uncultured Parcubacteria group bacterium]) amino acid sequence is as follows:

MSKRHPRISGVKGYRLHAQRLEYTGKSGAMRTIKYPLYSSPSGGRTVPRE
IVSAINDDYVGLYGLSNFDDLYNAEKRNEEKVYSVLDFWYDCVQYGAVFS
YTAPGLLKNVAEVRGGSYELTKTLKGSHLYDELQIDKVIKFLNKKEISRA
NGSLDKLKKDIIDCFKAEYRERHKDQCNKLADDIKNAKKDAGASLGERQK
KLFRDFFGISEQSENDKPSFTNPLNLTCCLLPFDTVNNNRNRGEVLFNKL
KEYAQKLDKNEGSLEMWEYIGIGNSGTAFSNFLGEGFLGRLRENKITELK
KAMMDITDAWRGQEQEEELEKRLRILAALTIKLREPKFDNHWGGYRSDIN
GKLSSWLQNYINQTVKIKEDLKGHKKDLKKAKEMINRFGESDTKEEAVVS
SLLESIEKIVPDDSADDEKPDIPAIAIYRRFLSDGRLTLNRFVQREDVQE
ALIKERLEAEKKKKPKKRKKKSDAEDEKETIDFKELFPHLAKPLKLVPNF
YGDSKRELYKKYKNAAIYTDALWKAVEKIYKSAFSSSLKNSFFDTDFDKD
FFIKRLQKIFSVYRRFNTDKWKPIVKNSFAPYCDIVSLAENEVLYKPKQS
RSRKSAAIDKNRVRLPSTENIAKAGIALARELSVAGFDWKDLLKKEEHEE
YIDLIELHKTALALLLAVTETQLDISALDFVENGTVKDFMKTRDGNLVLE
GRFLEMFSQSIVFSELRGLAGLMSRKEFITRSAIQTMNGKQAELLYIPHE
FQSAKITTPKEMSRAFLDLAPAEFATSLEPESLSEKSLLKLKQMRYYPHY
FGYELTRTGQGIDGGVAENALRLEKSPVKKREIKCKQYKTLGRGQNKIVL
YVRSSYYQTQFLEWFLHRPKNVQTDVAVSGSFLIDEKKVKTRWNYDALTV
ALEPVSGSERVFVSQPFTIFPEKSAEEEGQRYLGIDIGEYGIAYTALEIT
GDSAKILDQNFISDPQLKTLREEVKGLKLDQRRGTFAMPSTKIARIRESL
VHSLRNRIHHLALKHKAKIVYELEVSRFEEGKQKIKKVYATLKKADVYSE
IDADKNLQTTVWGKLAVASEISASYTSQFCGACKKLWRAEMQVDETITTQ
ELIGTVRVIKGGTLIDAIKDFMRPPIFDENDTPFPKYRDFCDKHHISKKM
RGNSCLFICPFCRANADADIQASQTIALLRYVKEEKKVEDYFERFRKLKN
IKVLGQMKKI

[0214] The Cas9 nuclease has two functional endonuclease domains: RuvC and HNH. Cas9 undergoes a conformational change upon target binding that positions the nuclease domains to cleave opposite strands of the target DNA. The end result of Cas9-mediated DNA cleavage is a double-strand break (DSB) within the target DNA (˜3-4 nucleotides upstream of the PAM sequence). The resulting DSB is then repaired by one of two general repair pathways: (1) the efficient but error-prone non-homologous end joining (NHEJ) pathway; or (2) the less efficient but high-fidelity homology directed repair (HDR) pathway.

[0215] The “efficiency” of non-homologous end joining (NHEJ) and/or homology directed repair (HDR) can be calculated by any convenient method. For example, efficiency can be expressed in terms of percentage of successful HDR. For example, a surveyor nuclease assay can be used to generate cleavage products and the ratio of products to substrate can be used to calculate the percentage. For example, a surveyor nuclease enzyme can be used that directly cleaves DNA containing a newly integrated restriction sequence as the result of successful HDR. More cleaved substrate indicates a greater percent HDR (a greater efficiency of HDR). As an illustrative example, a fraction (percentage) of HDR can be calculated using the following equation [(cleavage products)/(substrate plus cleavage products)] (e.g., (b+c)/(a+b+c), where “a” is the band intensity of DNA substrate and “b” and “c” are the cleavage products).

[0216] In some embodiments, efficiency can be expressed in terms of percentage of successful NHEJ. For example, a T7 endonuclease I assay can be used to generate cleavage products, and the ratio of products to substrate can be used to calculate the percentage NHEJ. T7 endonuclease I cleaves mismatched heteroduplex DNA which arises from hybridization of wild-type and mutant DNA strands (NHEJ generates small random insertions or deletions (indels) at the site of the original break). More cleavage indicates a greater percent NHEJ (a greater efficiency of NHEJ). As an illustrative example, a fraction (percentage) of NHEJ can be calculated using the following equation: (1−(1−(b+c)/(a+b+c))^{1/2})×100, where “a” is the band intensity of DNA substrate and “b” and “c” are the cleavage products (Ran et. al., Cell. 2013 Sep. 12; 154(6):1380-9; and Ran et al., Nat Protoc. 2013 November; 8(11): 2281-2308).

[0217] The NHEJ repair pathway is the most active repair mechanism, and it frequently causes small nucleotide insertions or deletions (indels) at the DSB site. The randomness of NHEJ-mediated DSB repair has important practical implications, because a population of cells expressing Cas9 and a gRNA or a guide polynucleotide can result in a diverse array of mutations. In some embodiments, NHEJ gives rise to small indels in the target DNA that result in amino acid deletions, insertions, or frameshift mutations leading to premature stop codons within the open reading frame (ORF) of the targeted gene. The ideal end result is a loss-of-function mutation within the targeted gene.

[0218] While NHEJ-mediated DSB repair often disrupts the open reading frame of the gene, homology directed repair (HDR) can be used to generate specific nucleotide changes ranging from a single nucleotide change to large insertions like the addition of a fluorophore or tag.

[0219] In order to utilize HDR for gene editing, a DNA repair template containing the desired sequence can be delivered into the cell type of interest with the gRNA(s) and Cas9 or Cas9 nickase. The repair template can contain the desired edit as well as additional homologous sequence immediately upstream and downstream of the target (termed left & right homology arms). The length of each homology arm can be dependent on the size of the change being introduced, with larger insertions requiring longer homology arms. The repair template can be a single-stranded oligonucleotide, double-stranded oligonucleotide, or a double-stranded DNA plasmid. The efficiency of HDR is generally low (<10% of modified alleles) even in cells that express Cas9, gRNA and an exogenous repair template. The efficiency of HDR can be enhanced by synchronizing the cells, since HDR takes place during the S and G2 phases of the cell cycle. Chemically or genetically inhibiting genes involved in NHEJ can also increase HDR frequency.

[0220] In some embodiments, Cas9 is a modified Cas9. A given gRNA targeting sequence can have additional sites throughout the genome where partial homology exists. These sites are called off-targets and need to be considered when designing a gRNA. In addition to optimizing gRNA design, CRISPR specificity can also be increased through modifications to Cas9. Cas9 generates double-strand breaks (DSBs) through the combined activity of two nuclease domains, RuvC and HNH. Cas9 nickase, a D10A mutant of SpCas9, retains one nuclease domain and generates a DNA nick rather than a DSB. The nickase system can also be combined with HDR-mediated gene editing for specific gene edits.

[0221] In some embodiments, Cas9 is a variant Cas9 protein. A variant Cas9 polypeptide has an amino acid sequence that is different by one amino acid (e.g., has a deletion, insertion, substitution, fusion) when compared to the amino acid sequence of a wild type Cas9 protein. In some instances, the variant Cas9 polypeptide has an amino acid change (e.g., deletion, insertion, or substitution) that reduces the nuclease activity of the Cas9 polypeptide. For example, in some instances, the variant Cas9 polypeptide has less than 50%, less than 40%, less than 30%, less than 20%, less than 10%, less than 5%, or less than 1% of the nuclease activity of the corresponding wild-type Cas9 protein. In some embodiments, the variant Cas9 protein has no substantial nuclease activity. When a subject Cas9 protein is a variant Cas9 protein that has no substantial nuclease activity, it can be referred to as “dCas9.”

[0222] In some embodiments, a variant Cas9 protein has reduced nuclease activity. For example, a variant Cas9 protein exhibits less than about 20%, less than about 15%, less than about 10%, less than about 5%, less than about 1%, or less than about 0.1%, of the endonuclease activity of a wild-type Cas9 protein, e.g., a wild-type Cas9 protein.

[0223] In some embodiments, a variant Cas9 protein can cleave the complementary strand of a guide target sequence but has reduced ability to cleave the non-complementary strand of a double stranded guide target sequence. For example, the variant Cas9 protein can have a mutation (amino acid substitution) that reduces the function of the RuvC domain. As a non-limiting example, in some embodiments, a variant Cas9 protein has a D10A (aspartate to alanine at amino acid position 10) and can therefore cleave the complementary strand of a double stranded guide target sequence but has reduced ability to cleave the non-complementary strand of a double stranded guide target sequence (thus resulting in a single strand break (SSB) instead of a double strand break (DSB) when the variant Cas9 protein cleaves a double stranded target nucleic acid) (see, for example, Jinek et al., Science. 2012 Aug. 17; 337(6096):816-21).

[0224] In some embodiments, a variant Cas9 protein can cleave the non-complementary strand of a double stranded guide target sequence but has reduced ability to cleave the complementary strand of the guide target sequence. For example, the variant Cas9 protein can have a mutation (amino acid substitution) that reduces the function of the HNH domain (RuvC/HNH/RuvC domain motifs). As a non-limiting example, in some embodiments, the variant Cas9 protein has an H840A (histidine to alanine at amino acid position 840) mutation and can therefore cleave the non-complementary strand of the guide target sequence but has reduced ability to cleave the complementary strand of the guide target sequence (thus resulting in a SSB instead of a DSB when the variant Cas9 protein cleaves a double stranded guide target sequence). Such a Cas9 protein has a reduced ability to cleave a guide target sequence (e.g., a single stranded guide target sequence) but retains the ability to bind a guide target sequence (e.g., a single stranded guide target sequence).

[0225] In some embodiments, a variant Cas9 protein has a reduced ability to cleave both the complementary and the non-complementary strands of a double stranded target DNA. As a non-limiting example, in some embodiments, the variant Cas9 protein harbors both the D10A and the H840A mutations such that the polypeptide has a reduced ability to cleave both the complementary and the non-complementary strands of a double stranded target DNA. Such a Cas9 protein has a reduced ability to cleave a target DNA (e.g., a single stranded target DNA) but retains the ability to bind a target DNA (e.g., a single stranded target DNA).

[0226] As another non-limiting example, in some embodiments, the variant Cas9 protein harbors W476A and W1126A mutations such that the polypeptide has a reduced ability to cleave a target DNA. Such a Cas9 protein has a reduced ability to cleave a target DNA (e.g., a single stranded target DNA) but retains the ability to bind a target DNA (e.g., a single stranded target DNA).

[0227] As another non-limiting example, in some embodiments, the variant Cas9 protein harbors P475A, W476A, N477A, D1125A, W1126A, and D1127A mutations such that the polypeptide has a reduced ability to cleave a target DNA. Such a Cas9 protein has a reduced ability to cleave a target DNA (e.g., a single stranded target DNA) but retains the ability to bind a target DNA (e.g., a single stranded target DNA).

[0228] As another non-limiting example, in some embodiments, the variant Cas9 protein harbors H840A, W476A, and W1126A mutations such that the polypeptide has a reduced ability to cleave a target DNA. Such a Cas9 protein has a reduced ability to cleave a target DNA (e.g., a single stranded target DNA) but retains the ability to bind a target DNA (e.g., a single stranded target DNA). As another non-limiting example, in some embodiments, the variant Cas9 protein harbors H840A, D10A, W476A, and W1126A, mutations such that the polypeptide has a reduced ability to cleave a target DNA. Such a Cas9 protein has a reduced ability to cleave a target DNA (e.g., a single stranded target DNA) but retains the ability to bind a target DNA (e.g., a single stranded target DNA). In some embodiments, the variant Cas9 has restored catalytic His residue at position 840 in the Cas9 HNH domain (A840H).

[0229] As another non-limiting example, in some embodiments, the variant Cas9 protein harbors, H840A, P475A, W476A, N477A, D1125A, W1126A, and D1127A mutations such that the polypeptide has a reduced ability to cleave a target DNA. Such a Cas9 protein has a reduced ability to cleave a target DNA (e.g., a single stranded target DNA) but retains the ability to bind a target DNA (e.g., a single stranded target DNA). As another non-limiting example, in some embodiments, the variant Cas9 protein harbors D10A, H840A, P475A, W476A, N477A, D1125A, W1126A, and D1127A mutations such that the polypeptide has a reduced ability to cleave a target DNA. Such a Cas9 protein has a reduced ability to cleave a target DNA (e.g., a single stranded target DNA) but retains the ability to bind a target DNA (e.g., a single stranded target DNA). In some embodiments, when a variant Cas9 protein harbors W476A and W1126A mutations or when the variant Cas9 protein harbors P475A, W476A, N477A, D1125A, W1126A, and D1127A mutations, the variant Cas9 protein does not bind efficiently to a PAM sequence. Thus, in some such embodiments, when such a variant Cas9 protein is used in a method of binding, the method does not require a PAM sequence. In other words, in some embodiments, when such a variant Cas9 protein is used in a method of binding, the method can include a guide RNA, but the method can be performed in the absence of a PAM sequence (and the specificity of binding is therefore provided by the targeting segment of the guide RNA). Other residues can be mutated to achieve the above effects (i.e., inactivate one or the other nuclease portions). As non-limiting examples, residues D10, G12, G17, E762, H840, N854, N863, H982, H983, A984, D986, and/or A987 can be altered (i.e., substituted). Also, mutations other than alanine substitutions are suitable.

[0230] In some embodiments, a variant Cas9 protein that has reduced catalytic activity (e.g., when a Cas9 protein has a D10, G12, G17, E762, H840, N854, N863, H982, H983, A984, D986, and/or a A987 mutation, e.g., D10A, G12A, G17A, E762A, H840A, N854A, N863A, H982A, H983A, A984A, and/or D986A), the variant Cas9 protein can still bind to target DNA in a site-specific manner (because it is still guided to a target DNA sequence by a guide RNA) as long as it retains the ability to interact with the guide RNA.

[0231] In some embodiments, the variant Cas protein can be spCas9, spCas9-VRQR, spCas9-VRER, xCas9 (sp), saCas9, saCas9-KKH, spCas9-MQKSER, spCas9-LRKIQK, or spCas9-LRVSQL.

[0232] In some embodiments, a modified SpCas9 including amino acid substitutions D1135M, 51136Q, G1218K, E1219F, A1322R, D1332A, R1335E, and T1337R (SpCas9-MQKFRAER) and having specificity for the altered PAM 5′-NGC-3′ was used.

[0233] Alternatives to S. pyogenes Cas9 can include RNA-guided endonucleases from the Cpf1 family that display cleavage activity in mammalian cells. CRISPR from Prevotella and Francisella 1 (CRISPR/Cpf1) is a DNA-editing technology analogous to the CRISPR/Cas9 system. Cpf1 is an RNA-guided endonuclease of a class II CRISPR/Cas system. This acquired immune mechanism is found in Prevotella and Francisella bacteria. Cpf1 genes are associated with the CRISPR locus, coding for an endonuclease that use a guide RNA to find and cleave viral DNA. Cpf1 is a smaller and simpler endonuclease than Cas9, overcoming some of the CRISPR/Cas9 system limitations. Unlike Cas9 nucleases, the result of Cpf1-mediated DNA cleavage is a double-strand break with a short 3′ overhang. Cpf1's staggered cleavage pattern can open up the possibility of directional gene transfer, analogous to traditional restriction enzyme cloning, which can increase the efficiency of gene editing. Like the Cas9 variants and orthologues described above, Cpf1 can also expand the number of sites that can be targeted by CRISPR to AT-rich regions or AT-rich genomes that lack the NGG PAM sites favored by SpCas9. The Cpf1 locus contains a mixed alpha/beta domain, a RuvC-I followed by a helical region, a RuvC-II and a zinc finger-like domain. The Cpf1 protein has a RuvC-like endonuclease domain that is similar to the RuvC domain of Cas9.

[0234] Furthermore, Cpf1, unlike Cas9, does not have a HNH endonuclease domain, and the N-terminal of Cpf1 does not have the alpha-helical recognition lobe of Cas9. Cpf1 CRISPR-Cas domain architecture shows that Cpf1 is functionally unique, being classified as Class 2, type V CRISPR system. The Cpf1 loci encode Cas1, Cas2 and Cas4 proteins that are more similar to types I and III than type II systems. Functional Cpf1 does not require the trans-activating CRISPR RNA (tracrRNA), therefore, only CRISPR (crRNA) is required. This benefits genome editing because Cpf1 is not only smaller than Cas9, but also it has a smaller sgRNA molecule (approximately half as many nucleotides as Cas9). The Cpf1-crRNA complex cleaves target DNA or RNA by identification of a protospacer adjacent motif 5′-YTN-3′ or 5′-TTN-3′ in contrast to the G-rich PAM targeted by Cas9. After identification of PAM, Cpf1 introduces a sticky-end-like DNA double-stranded break having an overhang of 4 or 5 nucleotides.

[0235] In some embodiments, the Cas9 is a Cas9 variant having specificity for an altered PAM sequence. In some embodiments, the Additional Cas9 variants and PAM sequences are described in Miller, S. M., et al. Continuous evolution of SpCas9 variants compatible with non-G PAMs, Nat. Biotechnol. (2020), the entirety of which is incorporated herein by reference. in some embodiments, a Cas9 variate have no specific PAM requirements. In some embodiments, a Cas9 variant, e.g. a SpCas9 variant has specificity for a NRNH PAM, wherein R is A or G and H is A, C, or T. In some embodiments, the SpCas9 variant has specificity for a PAM sequence AAA, TAA, CAA, GAA, TAT, GAT, or CAC. In some embodiments, the SpCas9 variant comprises an amino acid substitution at position 1114, 1134, 1135, 1137, 1139, 1151, 1180, 1188, 1211, 1218, 1219, 1221, 1249, 1256, 1264, 1290, 1318, 1317, 1320, 1321, 1323, 1332, 1333, 1335, 1337, or 1339 as numbered in SEQ ID NO: 1 or a corresponding position thereof. In some embodiments, the SpCas9 variant comprises an amino acid substitution at position 1114, 1135, 1218, 1219, 1221, 1249, 1320, 1321, 1323, 1332, 1333, 1335, or 1337 as numbered in SEQ ID NO: 1 or a corresponding position thereof. In some embodiments, the SpCas9 variant comprises an amino acid substitution at position 1114, 1134, 1135, 1137, 1139, 1151, 1180, 1188, 1211, 1219, 1221, 1256, 1264, 1290, 1318, 1317, 1320, 1323, 1333 as numbered in SEQ ID NO: 1 or a corresponding position thereof. In some embodiments, the SpCas9 variant comprises an amino acid substitution at position 1114, 1131, 1135, 1150, 1156, 1180, 1191, 1218, 1219, 1221, 1227, 1249, 1253, 1286, 1293, 1320, 1321, 1332, 1335, 1339 as numbered in SEQ ID NO: 1 or a corresponding position thereof. In some embodiments, the SpCas9 variant comprises an amino acid substitution at position 1114, 1127, 1135, 1180, 1207, 1219, 1234, 1286, 1301, 1332, 1335, 1337, 1338, 1349 as numbered in SEQ ID NO: 1 or a corresponding position thereof. Exemplary amino acid substitutions and PAM specificity of SpCas9 variants are shown in Tables 1A-1D.

TABLE 1A

| | SpCas9 amino acid position | | | | | | | | | | | | |
|---|---|---|---|---|---|---|---|---|---|---|---|---|---|
| | 1114 | 1135 | 1218 | 1219 | 1221 | 1249 | 1320 | 1321 | 1323 | 1332 | 1333 | 1335 | 1337 |
| SpCas9 | R | D | G | E | Q | P | A | P | A | D | R | R | T |
| AAA | | N | | V | H | | | | | | G | | |
| AAA | | N | | V | H | | | | | | G | | |
| AAA | | | | V | | | | | | | G | | |
| TAA | G | N | | V | | | | | | | I | | |
| TAA | | N | | V | | | | | | | I | | A |
| TAA | G | N | | V | | | | | | | I | | A |
| CAA | | | | V | | | | | | | K | | |
| CAA | | N | | V | | | | | | | K | | |
| CAA | | N | | V | | | | | | | K | | |
| GAA | | | | V | H | | V | | | | K | | |
| GAA | | N | | V | | | V | | | | K | | |
| GAA | | | | V | H | | V | | | | K | | |
| TAT | | | S | V | H | S | | S | | | | L | |
| TAT | | | S | V | H | S | | S | | | | L | |
| TAT | | | S | V | H | S | | S | | | | L | |
| GAT | | | | V | | | | | | | I | | |
| GAT | | | | V | | | | | D | | | Q | |
| GAT | | | | V | | | | | D | | | Q | |
| CAC | | | | V | | | | | | N | | Q | N |
| CAC | | N | | V | | | | | | | | Q | N |
| CAC | | | | V | | | | | | N | | Q | N |

TABLE 1B

| | SpCas9 amino acid position | | | | | | | | | | | | | | | | | | |
|---|---|---|---|---|---|---|---|---|---|---|---|---|---|---|---|---|---|---|---|
| | 1114 | 1134 | 1135 | 1137 | 1139 | 1151 | 1180 | 1188 | 1211 | 1219 | 1221 | 1256 | 1264 | 1290 | 1318 | 1317 | 1320 | 1323 | 1333 |
| SpCas9 | R | F | D | P | V | K | D | K | K | E | Q | Q | H | V | L | N | A | A | R |
| GAA | | | | | | | | | | V | H | | | | | | V | | K |
| GAA | | | N | S | | | | | | V | | | | | | | V | D | K |
| GAA | | | N | | | | | | | V | H | | Y | | | | V | | K |
| CAA | | | N | | | | | | | V | H | | Y | | | | V | | K |
| CAA | G | | N | S | | | | | | V | H | | Y | | | | V | | K |
| CAA | | | N | | | | | R | | V | H | | | | | | V | | K |
| CAA | | | N | | | | G | | R | V | H | | Y | | | | V | | K |
| CAA | | | N | | | | | | | V | H | | Y | | | | V | | K |
| AAA | | | N | | | | G | | | V | H | R | Y | | | | V | D | K |
| CAA | G | | N | | | | G | | | V | H | | Y | | | | V | D | K |
| CAA | | L | N | | | | G | | | V | H | | Y | | | T | V | D | K |
| TAA | G | | N | | | | G | | | V | H | | Y | G | S | | V | D | K |
| TAA | G | | N | | | E | G | | | V | H | | Y | | S | | V | | K |
| TAA | G | | N | | | | G | | | V | H | | Y | | S | | V | D | K |
| TAA | G | | N | | | | G | | R | V | H | | | | | | V | | K |
| TAA | | | N | | | | G | | R | V | H | | Y | | | | V | | K |
| TAA | G | | N | | A | | G | | | V | H | | | | | | V | | K |
| TAA | G | | N | | | | | | | V | H | | | | | | V | | K |

TABLE 1C

| | SpCas9 amino acid position | | | | | | | | | | | |
|---|---|---|---|---|---|---|---|---|---|---|---|---|
| | 1114 | 1131 | 1135 | 1150 | 1156 | 1180 | 1191 | 1218 | 1219 | 1221 | 1227 | 1249 |
| SpCas9 | R | Y | D | E | K | D | K | G | E | Q | A | P |
| SacB. | | | N | | | | N | | V | H | | |
| TAT | | | | | | | | | | | | |
| SacB. | | | N | | | | | S | V | H | | S |
| TAT | | | | | | | | | | | | |
| AAT | | | N | | | | | S | V | H | V | S |
| TAT | G | | N | | | G | | S | V | H | | S |
| TAT | G | | N | | | G | | S | V | H | | S |
| TAT | G | C | N | | | G | | S | V | H | | S |
| TAT | G | C | N | | | G | | S | V | H | | S |
| TAT | G | C | N | | | G | | S | V | H | | S |
| TAT | G | C | N | | E | G | | S | V | H | | S |
| TAT | G | C | N | V | | G | | S | V | H | | S |
| TAT | | C | N | | | G | | S | V | H | | S |
| TAT | G | C | N | | | G | | S | V | H | | S |

| | SpCas9 amino acid position | | | | | | | |
|---|---|---|---|---|---|---|---|---|
| | 1253 | 1286 | 1293 | 1320 | 1321 | 1332 | 1335 | 1339 |
| SpCas9 | E | N | A | A | P | D | R | T |
| SacB. | | | | V | S | | L | |
| TAT | | | | | | | | |
| SacB. | | | | | S | G | L | |
| TAT | | | | | | | | |
| AAT | | K | T | | S | G | L | I |
| TAT | K | | | | S | G | L | |
| TAT | | | | | S | G | L | |
| TAT | | | | | S | G | L | |
| TAT | | | | | S | G | L | |
| TAT | | | | | S | G | L | |
| TAT | | | | | S | G | L | |
| TAT | | | | | S | G | L | |
| TAT | | | | | S | G | L | |
| TAT | | | | | S | G | L | |

TABLE 1D

| | SpCas9 amino acid position | | | | | | | | | | | | | |
|---|---|---|---|---|---|---|---|---|---|---|---|---|---|---|
| | 1114 | 1127 | 1135 | 1180 | 1207 | 1219 | 1234 | 1286 | 1301 | 1332 | 1335 | 1337 | 1338 | 1349 |
| SpCas9 | R | D | D | D | E | E | N | N | P | D | R | T | S | H |
| SacB.CA | | | N | | | V | | | | N | Q | N | | |
| C | | | | | | | | | | | | | | |
| AAC | G | | N | | | V | | | | N | Q | N | | |
| AAC | G | | N | | | V | | | | N | Q | N | | |
| TAC | G | | N | | | V | | | | N | Q | N | | |
| TAC | G | | N | | | V | | H | | N | Q | N | | |
| TAC | G | | N | | G | V | D | H | | N | Q | N | | |
| TAC | G | | N | | | V | | | | N | Q | N | | |
| TAC | G | G | N | E | | V | | H | | N | Q | N | | |
| TAC | G | | N | | | V | | H | | N | Q | N | | |
| TAC | G | | N | | | V | | | | N | Q | N | T | R |

[0236] In some embodiments, the Cas9 is a Neisseria menigitidis Cas9 (NmeCas9) or a variant thereof. In some embodiments, the NmeCas9 has specificity for a NNNNGAYW PAM, wherein Y is C or T and W is A or T. In some embodiments, the NmeCas9 has specificity for a NNNNGYTT PAM, wherein Y is C or T. In some embodiments, the NmeCas9 has specificity for a NNNNGTCT PAM. In some embodiments, the NmeCas9 is a Nme1 Cas9. In some embodiments, the NmeCas9 has specificity for a NNNNGATT PAM, a NNNNCCTA PAM, a NNNNCCTC PAM, a NNNNCCTT PAM, a NNNNCCTG PAM, a NNNNCCGT PAM, a NNNNCCGGPAM, a NNNNCCCA PAM, a NNNNCCCT PAM, a NNNNCCCC PAM, a NNNNCCAT PAM, a NNNNCCAG PAM, a NNNNCCAT PAM, or a NNNGATT PAM. In some embodiments, the NmelCas9 has specificity for a NNNNGATT PAM, a NNNNCCTA PAM, a NNNNCCTC PAM, a NNNNCCTT PAM, or a NNNNCCTG PAM. In some embodiments, the NmeCas9 has specificity for a CAA PAM, a CAAA PAM, or a CCA PAM. In some embodiments, the NmeCas9 is a Nme2 Cas9. In some embodiments, the NmeCas9 has specificity for a NNNNCC (N4CC) PAM, wherein N is any one of A, G, C, or T. in some embodiments, the NmeCas9 has specificity for a NNNNCCGT PAM, a NNNNCCGGPAM, a NNNNCCCA PAM, a NNNNCCCT PAM, a NNNNCCCC PAM, a NNNNCCAT PAM, a NNNNCCAG PAM, a NNNNCCAT PAM, or a NNNGATT PAM. In some embodiments, the NmeCas9 is a Nme3Cas9. In some embodiments, the NmeCas9 has specificity for a NNNNCAAA PAM, a NNNNCC PAM, or a NNNNCNNN PAM. Additional NmeCas9 features and PAM sequences as described in Edraki et al. Mol. Cell. (2019) 73(4): 714-726 is incorporated herein by reference in its entirety.

[0237] An exemplary amino acid sequence of a Nme1Cas9 is provided below:

| type II CRISPR RNA-guided endonuclease Cas9 [Neisseria meningitidis] | |
|---|---|
| WP_002235162.1 | |
| 1 | maafkpnpin yilgidigia svgwamveid edenpiclid lgvrvferae vpktgdslam |
| 61 | arrlarsvrr ltrrrahrll rarrllkreg vlqaadfden glikslpntp wqlraaaldr |
| 121 | kltplewsav llhlikhrgy lsqrkneget adkelgallk gvadnahalq tgdfrtpael |
| 181 | alnkfekesg hirnqrgdys htfsrkdlqa elillfekqk efgnphvsgg ikegietllm |
| 241 | tqrpalsgda vqkmlghctf epaepkaakn tytaerfiwl tklnnlrile qgserpltdt |
| 301 | eratlmdepy rkskltyaqa rkllgledta ffkglrygkd naeastlmem kayhaisral |
| 361 | ekeglkdkks plnlspelqd eigtafsifk tdeditgrlk driqpeilea llkhisfdkf |
| 421 | vqislkalrr ivplmeqgkr ydeacaeiyg dhygkkntee kiylppipad eirnpvvlra |
| 481 | lsqarkving vvrrygspar ihietarevg ksfkdrkeie krqeenrkdr ekaaakfrey |
| 541 | fpnfvgepks kdilklrlye qqhgkclysg keinlgrlne kgyveidhal pfsrtwddsf |
| 601 | nnkvlvlgse nqnkgnqtpy eyfngkdnsr ewqefkarve tsrfprskkq rillqkfded |
| 661 | gfkernlndt ryvnrflcqf vadrmrltgk gkkrvfasng qitnllrgfw glrkvraend |
| 721 | rhhaldavvv acstvamqqk itrfvrykem nafdgktidk etgevlhqkt hfpqpweffa |
| 781 | qevmirvfgk pdgkpefeea dtpeklrtll aeklssrpea vheyvtplfv srapnrkmsg |
| 841 | qghmetvksa krldegvsvl rvpltqlklk dlekmvnrer epklyealka rleahkddpa |
| 901 | kafaepfyky dkagnrtqqv kavrveqvqk tgvwvrnhng iadnatmvrv dvfekgdkyy |
| 961 | lvpiyswqva kgilpdravv qgkdeedwql iddsfnfkfs ihpndlvevi tkkarmfgyf |
| 1021 | aschrgtgni nirihdldhk igkngilegi gvktalsfqk yqidelgkei rpcrlkkrpp |
| 1081 | vr |

[0238] An exemplary amino acid sequence of a Nme2Cas9 is provided below:

| type II CRISPR RNA-guided endonuclease Cas9 [Neisseria meningitidis] | |
|---|---|
| WP 002230835.1 | |
| 1 | maafkpnpin yilgidigia svgwamveid eeenpirlid lgvrvferae vpktgdslam |
| 61 | arrlarsvrr ltrrrahrll rarrllkreg vlqaadfden glikslpntp wqlraaaldr |
| 121 | kltplewsav llhlikhrgy lsqrkneget adkelgallk gvannahalq tgdfrtpael |
| 181 | alnkfekesg hirnqrgdys htfsrkdlqa elillfekqk efgnphvsgg lkegietllm |
| 241 | tqrpalsgda vqkmlghctf epaepkaakn tytaerfiwl tklnnlrile qgserpltdt |
| 301 | eratlmdepy rkskltyaqa rkllgledta ffkglrygkd naeastlmem kayhaisral |
| 361 | ekeglkdkks plnlsselqd eigtafslfk tdeditgrlk drvqpeilea llkhisfdkf |
| 421 | vqislkalrr ivplmeqgkr ydeacaeiyg dhygkkntee kiylppipad eirnpvvlra |
| 481 | lsqarkving vvrrygspar ihietarevg ksfkdrkeie krqeenrkdr ekaaakfrey |
| 541 | fpnfvgepks kdilklrlye qqhgkclysg keinlvrlne kgyveidhal pfsrtwddsf |
| 601 | nnkvlvlgse nqnkgnqtpy eyfngkdnsr ewqefkarve tsrfprskkq rillqkfded |
| 661 | gfkecnlndt ryvnrflcqf vadhilltgk gkrrvfasng qitnllrgfw glrkvraend |
| 721 | rhhaldavvv acstvamqqk itrfvrykem nafdgktidk etgkvlhqkt hfpqpweffa |
| 781 | qevmirvfgk pdgkpefeea dtpeklrtll aeklssrpea vheyvtplfv srapnrkmsg |
| 841 | ahkdtlrsak rfvkhnekis vkrvwlteik ladlenmvny kngreielye alkarleayg |
| 901 | gnakqafdpk dnpfykkggq lvkavrvekt qesgvllnkk naytiadngd mvrvdvfckv |
| 961 | dkkgknqyfi vpiyawqvae nilpdidckg yriddsytfc fslhkydlia fqkdekskve |
| 1021 | fayyincdss ngrfylawhd kgskeqqfri stqnlvliqk yqvnelgkei rpcrlkkrpp |
| 1081 | vr |

Cas12 domains of Nucleobase Editors

[0239] Typically, microbial CRISPR-Cas systems are divided into Class 1 and Class 2 systems. Class 1 systems have multisubunit effector complexes, while Class 2 systems have a single protein effector. For example, Cas9 and Cpf1 are Class 2 effectors, albeit different types (Type II and Type V, respectively). In addition to Cpf1, Class 2, Type V CRISPR-Cas systems also comprise Cas12a/Cpf1, Cas12b/C2c1, Cas12c/C2c3, Cas12d/CasY, Cas12e/CasX, Cas12g, Cas12h, and Cas12i). See, e.g., Shmakov et al., “Discovery and Functional Characterization of Diverse Class 2 CRISPR Cas Systems,” Mol. Cell, 2015 Nov. 5; 60(3): 385-397; Makarova et al., “Classification and Nomenclature of CRISPR-Cas Systems: Where from Here?” CRISPR Journal, 2018, 1(5): 325-336; and Yan et al., “Functionally Diverse Type V CRISPR-Cas Systems,” Science, 2019 Jan. 4; 363: 88-91; the entire contents of each is hereby incorporated by reference. Type V Cas proteins contain a RuvC (or RuvC-like) endonuclease domain. While production of mature CRISPR RNA (crRNA) is generally tracrRNA-independent, Cas12b/C2c1, for example, requires tracrRNA for production of crRNA. Cas12b/C2c1 depends on both crRNA and tracrRNA for DNA cleavage.

[0240] Nucleic acid programmable DNA binding proteins contemplated in the present disclosure include Cas proteins that are classified as Class 2, Type V (Cas12 proteins). Non-limiting examples of Cas Class 2, Type V proteins include Cas12a/Cpf1, Cas12b/C2c1, Cas12c/C2c3, Cas12d/CasY, Cas12e/CasX, Cas12g, Cas12h, and Cas12i, homologues thereof, or modified versions thereof. As used herein, a Cas12 protein can also be referred to as a Cas12 nuclease, a Cas12 domain, or a Cas12 protein domain. In some embodiments, the Cas12 proteins of the present disclosure comprise an amino acid sequence interrupted by an internally fused protein domain such as a deaminase domain.

[0241] In some embodiments, the Cas12 domain is a nuclease inactive Cas12 domain or a Cas12 nickase. In some embodiments, the Cas12 domain is a nuclease active domain. For example, the Cas12 domain may be a Cas12 domain that nicks one strand of a duplexed nucleic acid (e.g., duplexed DNA molecule). In some embodiments, the Cas12 domain comprises any one of the amino acid sequences as set forth herein. In some embodiments the Cas12 domain comprises an amino acid sequence that is at least 60%, at least 65%, at least 70%, at least 75%, at least 80%, at least 85%, at least 90%, at least 95%, at least 96%, at least 97%, at least 98%, at least 99%, or at least 99.5% identical to any one of the amino acid sequences set forth herein. In some embodiments, the Cas12 domain comprises an amino acid sequence that has 1, 2, 3, 4, 5, 6, 7, 8, 9, 10, 11, 12, 13, 14, 15, 16, 17, 18, 19, 20, 21, 22, 21, 24, 25, 26, 27, 28, 29, 30, 31, 32, 33, 34, 35, 36, 37, 38, 39, 40, 41, 42, 43, 44, 45, 46, 47, 48, 49, 50 or more mutations compared to any one of the amino acid sequences set forth herein. In some embodiments, the Cas12 domain comprises an amino acid sequence that has at least 10, at least 15, at least 20, at least 30, at least 40, at least 50, at least 60, at least 70, at least 80, at least 90, at least 100, at least 150, at least 200, at least 250, at least 300, at least 350, at least 400, at least 500, at least 600, at least 700, at least 800, at least 900, at least 1000, at least 1100, or at least 1200 identical contiguous amino acid residues as compared to any one of the amino acid sequences set forth herein.

[0242] In some embodiments, proteins comprising fragments of Cas12 are provided. For example, in some embodiments, a protein comprises one of two Cas12 domains: (1) the gRNA binding domain of Cas12; or (2) the DNA cleavage domain of Cas12. In some embodiments, proteins comprising Cas12 or fragments thereof are referred to as “Cas12 variants.” A Cas12 variant shares homology to Cas12, or a fragment thereof. For example, a Cas12 variant is at least about 70% identical, at least about 80% identical, at least about 90% identical, at least about 95% identical, at least about 96% identical, at least about 97% identical, at least about 98% identical, at least about 99% identical, at least about 99.5% identical, or at least about 99.9% identical to wild type Cas12. In some embodiments, the Cas12 variant may have 1, 2, 3, 4, 5, 6, 7, 8, 9, 10, 11, 12, 13, 14, 15, 16, 17, 18, 19, 20, 21, 22, 21, 24, 25, 26, 27, 28, 29, 30, 31, 32, 33, 34, 35, 36, 37, 38, 39, 40, 41, 42, 43, 44, 45, 46, 47, 48, 49, 50 or more amino acid changes compared to wild type Cas12. In some embodiments, the Cas12 variant comprises a fragment of Cas12 (e.g., a gRNA binding domain or a DNA cleavage domain), such that the fragment is at least about 70% identical, at least about 80% identical, at least about 90% identical, at least about 95% identical, at least about 96% identical, at least about 97% identical, at least about 98% identical, at least about 99% identical, at least about 99.5% identical, or at least about 99.9% identical to the corresponding fragment of wild type Cas12. In some embodiments, the fragment is at least 30%, at least 35%, at least 40%, at least 45%, at least 50%, at least 55%, at least 60%, at least 65%, at least 70%, at least 75%, at least 80%, at least 85%, at least 90%, at least 95% identical, at least 96%, at least 97%, at least 98%, at least 99%, or at least 99.5% of the amino acid length of a corresponding wild type Cas12. In some embodiments, the fragment is at least 100 amino acids in length. In some embodiments, the fragment is at least 100, 150, 200, 250, 300, 350, 400, 450, 500, 550, 600, 650, 700, 750, 800, 850, 900, 950, 1000, 1050, 1100, 1150, 1200, 1250, or at least 1300 amino acids in length.

[0243] In some embodiments, Cas12 corresponds to, or comprises in part or in whole, a Cas12 amino acid sequence having one or more mutations that alter the Cas12 nuclease activity. Such mutations, by way of example, include amino acid substitutions within the RuvC nuclease domain of Cas12. In some embodiments, variants or homologues of Cas12 are provided which are at least about 70% identical, at least about 80% identical, at least about 90% identical, at least about 95% identical, at least about 98% identical, at least about 99% identical, at least about 99.5% identical, or at least about 99.9% identical to a wild type Cas12. In some embodiments, variants of Cas12 are provided having amino acid sequences which are shorter, or longer, by about 5 amino acids, by about 10 amino acids, by about 15 amino acids, by about 20 amino acids, by about 25 amino acids, by about 30 amino acids, by about 40 amino acids, by about 50 amino acids, by about 75 amino acids, by about 100 amino acids or more.

[0244] In some embodiments, Cas12 fusion proteins as provided herein comprise the full-length amino acid sequence of a Cas12 protein, e.g., one of the Cas12 sequences provided herein. In other embodiments, however, fusion proteins as provided herein do not comprise a full-length Cas12 sequence, but only one or more fragments thereof. Exemplary amino acid sequences of suitable Cas12 domains are provided herein, and additional suitable sequences of Cas12 domains and fragments will be apparent to those of skill in the art.

[0245] Generally, the class 2, Type V Cas proteins have a single functional RuvC endonuclease domain (See, e.g., Chen et al., “CRISPR-Cas12a target binding unleashes indiscriminate single-stranded DNase activity,” Science 360:436-439 (2018)). In some cases, the Cas12 protein is a variant Cas12b protein. (See Strecker et al., Nature Communications, 2019, 10(1): Art. No.: 212). In one embodiment, a variant Cas12 polypeptide has an amino acid sequence that is different by 1, 2, 3, 4, 5 or more amino acids (e.g., has a deletion, insertion, substitution, fusion) when compared to the amino acid sequence of a wild type Cas12 protein. In some instances, the variant Cas12 polypeptide has an amino acid change (e.g., deletion, insertion, or substitution) that reduces the activity of the Cas12 polypeptide. For example, in some instances, the variant Cas12 is a Cas12b polypeptide that has less than 50%, less than 40%, less than 30%, less than 20%, less than 10%, less than 5%, or less than 1% of the nickase activity of the corresponding wild-type Cas12b protein. In some cases, the variant Cas12b protein has no substantial nickase activity.

[0246] In some cases, a variant Cas12b protein has reduced nickase activity. For example, a variant Cas12b protein exhibits less than about 20%, less than about 15%, less than about 10%, less than about 5%, less than about 1%, or less than about 0.1%, of the nickase activity of a wild-type Cas12b protein.

[0247] In some embodiments, the Cas12 protein includes RNA-guided endonucleases from the Cas12a/Cpf1 family that displays activity in mammalian cells. CRISPR from Prevotella and Francisella 1 (CRISPR/Cpf1) is a DNA editing technology analogous to the CRISPR/Cas9 system. Cpf1 is an RNA-guided endonuclease of a class II CRISPR/Cas system. This acquired immune mechanism is found in Prevotella and Francisella bacteria. Cpf1 genes are associated with the CRISPR locus, coding for an endonuclease that use a guide RNA to find and cleave viral DNA. Cpf1 is a smaller and simpler endonuclease than Cas9, overcoming some of the CRISPR/Cas9 system limitations. Unlike Cas9 nucleases, the result of Cpf1-mediated DNA cleavage is a double-strand break with a short 3′ overhang. Cpf1's staggered cleavage pattern can open up the possibility of directional gene transfer, analogous to traditional restriction enzyme cloning, which can increase the efficiency of gene editing. Like the Cas9 variants and orthologues described above, Cpf1 can also expand the number of sites that can be targeted by CRISPR to AT-rich regions or AT-rich genomes that lack the NGG PAM sites favored by SpCas9. The Cpf1 locus contains a mixed alpha/beta domain, a RuvC-I followed by a helical region, a RuvC-II and a zinc finger-like domain. The Cpf1 protein has a RuvC-like endonuclease domain that is similar to the RuvC domain of Cas9. Furthermore, Cpf1, unlike Cas9, does not have a HNH endonuclease domain, and the N-terminal of Cpf1 does not have the alpha-helical recognition lobe of Cas9. Cpf1 CRISPR-Cas domain architecture shows that Cpf1 is functionally unique, being classified as Class 2, type V CRISPR system. The Cpf1 loci encode Cas1, Cas2, and Cas4 proteins are more similar to types I and III than type II systems. Functional Cpf1 does not require the trans-activating CRISPR RNA (tracrRNA), therefore, only CRISPR (crRNA) is required. This benefits genome editing because Cpf1 is not only smaller than Cas9, but also it has a smaller sgRNA molecule (approximately half as many nucleotides as Cas9). The Cpf1-crRNA complex cleaves target DNA or RNA by identification of a protospacer adjacent motif 5′-YTN-3′ or 5′-TTTN-3′ in contrast to the G-rich PAM targeted by Cas9. After identification of PAM, Cpf1 introduces a sticky-end-like DNA double-stranded break having an overhang of 4 or 5 nucleotides.

[0248] In some aspects of the present disclosure, a vector encodes a CRISPR enzyme that is mutated to with respect to a corresponding wild-type enzyme such that the mutated CRISPR enzyme lacks the ability to cleave one or both strands of a target polynucleotide containing a target sequence can be used. Cas12 can refer to a polypeptide with at least or at least about 50%, 60%, 70%, 80%, 90%, 91%, 92%, 93%, 94%, 95%, 96%, 97%, 98%, 99%, or 100% sequence identity and/or sequence homology to a wild type exemplary Cas12 polypeptide (e.g., Cas12 from Bacillus hisashii). Cas12 can refer to a polypeptide with at most or at most about 50%, 60%, 70%, 80%, 90%, 91%, 92%, 93%, 94%, 95%, 96%, 97%, 98%, 99%, or 100% sequence identity and/or sequence homology to a wild type exemplary Cas12 polypeptide (e.g., from Bacillus hisashii (BhCas12b), Bacillus sp. V3-13 (BvCas12b), and Alicyclobacillus acidiphilus (AaCas12b)). Cas12 can refer to the wild type or a modified form of the Cas12 protein that can comprise an amino acid change such as a deletion, insertion, substitution, variant, mutation, fusion, chimera, or any combination thereof.

[0249] Nucleic acid programmable DNA binding proteins Some aspects of the disclosure provide fusion proteins comprising domains that act as nucleic acid programmable DNA binding proteins, which may be used to guide a protein, such as a base editor, to a specific nucleic acid (e.g., DNA or RNA) sequence. In particular embodiments, a fusion protein comprises a nucleic acid programmable DNA binding protein domain and a deaminase domain. Non-limiting examples of nucleic acid programmable DNA binding proteins include, Cas9 (e.g., dCas9 and nCas9), Cas12a/Cpf1, Cas12b/C2c1, Cas12c/C2c3, Cas12d/CasY, Cas12e/CasX, Cas12g, Cas12h, and Cas12i. Non-limiting examples of Cas enzymes include Cas1, Cas1B, Cas2, Cas3, Cas4, Cas5, Cas5d, Cas5t, Cas5h, Cas5a, Cash, Cas7, Cas8, Cas8a, Cas8b, Cas8c, Cas9 (also known as Csn1 or Csx12), Cas10, Cas10d, Cas12a/Cpf1, Cas12b/C2c1, Cas12c/C2c3, Cas12d/CasY, Cas12e/CasX, Cas12g, Cas12h, Cas12i, Csy1, Csy2, Csy3, Csy4, Cse1, Cse2, Cse3, Cse4, Cse5e, Csc1, Csc2, Csa5, Csn1, Csn2, Csm1, Csm2, Csm3, Csm4, Csm5, Csm6, Cmr1, Cmr3, Cmr4, Cmr5, Cmr6, Csb1, Csb2, Csb3, Csx17, Csx14, Csx10, Csx16, CsaX, Csx3, Csx1, Csx1S, Csx11, Csf1, Csf2, CsO, Csf4, Csd1, Csd2, Cst1, Cst2, Csh1, Csh2, Csa1, Csa2, Csa3, Csa4, Csa5, Type II Cas effector proteins, Type V Cas effector proteins, Type VI Cas effector proteins, CARF, DinG, homologues thereof, or modified or engineered versions thereof. Other nucleic acid programmable DNA binding proteins are also within the scope of this disclosure, although they may not be specifically listed in this disclosure. See, e.g., Makarova et al. “Classification and Nomenclature of CRISPR-Cas Systems: Where from Here?” CRISPR J. 2018 October; 1:325-336. doi: 10.1089/crispr.2018.0033; Yan et al., “Functionally diverse type V CRISPR-Cas systems” Science. 2019 Jan. 4; 363(6422):88-91. doi: 10.1126/science.aav7271, the entire contents of each are hereby incorporated by reference.

[0250] One example of a nucleic acid programmable DNA-binding protein that has different PAM specificity than Cas9 is Clustered Regularly Interspaced Short Palindromic Repeats from Prevotella and Francisella 1 (Cpf1). Similar to Cas9, Cpf1 is also a class 2 CRISPR effector. It has been shown that Cpf1 mediates robust DNA interference with features distinct from Cas9. Cpf1 is a single RNA-guided endonuclease lacking tracrRNA, and it utilizes a T-rich protospacer-adjacent motif (TTN, TTTN, or YTN). Moreover, Cpf1 cleaves DNA via a staggered DNA double-stranded break. Out of 16 Cpf1-family proteins, two enzymes from Acidaminococcus and Lachnospiraceae are shown to have efficient genome-editing activity in human cells. Cpf1 proteins are known in the art and have been described previously, for example Yamano et al., “Crystal structure of Cpf1 in complex with guide RNA and target DNA,” Cell (165) 2016, p. 949-962; the entire contents of which is hereby incorporated by reference.

[0251] Useful in the present compositions and methods are nuclease-inactive Cpf1 (dCpf1) variants that may be used as a guide nucleotide sequence-programmable DNA-binding protein domain. The Cpf1 protein has a RuvC-like endonuclease domain that is similar to the RuvC domain of Cas9 but does not have a HNH endonuclease domain, and the N-terminal of Cpf1 does not have the alfa-helical recognition lobe of Cas9. It was shown in Zetsche et al., Cell, 163, 759-771, 2015 (which is incorporated herein by reference) that, the RuvC-like domain of Cpf1 is responsible for cleaving both DNA strands and inactivation of the RuvC-like domain inactivates Cpf1 nuclease activity. For example, mutations corresponding to D917A, E1006A, or D1255A in Francisella novicida Cpf1 inactivate Cpf1 nuclease activity. In some embodiments, the dCpf1 of the present disclosure comprises mutations corresponding to D917A, E1006A, D1255A, D917A/E1006A, D917A/D1255A, E1006A/D1255A, or D917A/E1006A/D1255A. It is to be understood that any mutations, e.g., substitution mutations, deletions, or insertions that inactivate the RuvC domain of Cpf1, may be used in accordance with the present disclosure.

[0252] In some embodiments, the nucleic acid programmable DNA binding protein (napDNAbp) of any of the fusion proteins provided herein may be a Cpf1 protein. In some embodiments, the Cpf1 protein is a Cpf1 nickase (nCpf1). In some embodiments, the Cpf1 protein is a nuclease inactive Cpf1 (dCpf1). In some embodiments, the Cpf1, the nCpf1, or the dCpf1 comprises an amino acid sequence that is at least 85%, at least 90%, at least 91%, at least 92%, at least 93%, at least 94%, at least 95%, at least 96%, at least 97%, at least 98%, at least 99%, or at least 99.5% identical to a Cpf1 sequence disclosed herein. In some embodiments, the dCpf1 comprises an amino acid sequence that is at least 85%, at least 90%, at least 91%, at least 92%, at least 93%, at least 94%, at least 95%, at least 96%, at least 97%, at least 98%, at least 99%, or at ease 99.5% identical to a Cpf1 sequence disclosed herein, and comprises mutations corresponding to D917A, E1006A, D1255A, D917A/E1006A, D917A/D1255A, E1006A/D1255A, or D917A/E1006A/D1255A. It should be appreciated that Cpf1 from other bacterial species may also be used in accordance with the present disclosure.

Wild type Francisella novicida Cpf1 (D917, E1006, and DI255 are
bolded and underlined)
MSIYQEFVNKYSLSKTLRFELIPQGKTLENIKARGLILDDEKRAKDYKKAKQIIDKYHQFFIEEI
LSSVCISEDLLQNYSDVYFKLKKSDDDNLQKDFKSAKDTIKKQISEYIKDSEKFKNLFNQNLIDA
KKGQESDLILWLKQSKDNGIELFKANSDITDIDEALEIIKSFKGWTTYFKGFHENRKNVYSSNDI
PTSIIYRIVDDNLPKFLENKAKYESLKDKAPEAINYEQIKKDLAEELTFDIDYKTSEVNQRVFSL
DEVFEIANFNNYLNQSGITKFNTIIGGKFVNGENTKRKGINEYINLYSQQINDKTLKKYKMSVLF
KQILSDTESKSFVIDKLEDDSDVVTTMQSFYEQIAAFKTVEEKSIKETLSLLFDDLKAQKLDLSK
IYFKNDKSLTDLSQQVFDDYSVIGTAVLEYITQQIAPKNLDNPSKKEQELIAKKTEKAKYLSLET
IKLALEEFNKHRDIDKQCRFEEILANFAAIPMIFDEIAQNKDNLAQISIKYQNQGKKDLLQASAE
DDVKAIKDLLDQTNNLLHKLKIFHISQSEDKANILDKDEHFYLVFEECYFELANIVPLYNKIRNY
ITQKPYSDEKFKLNFENSTLANGWDKNKEPDNTAILFIKDDKYYLGVMNKKNNKIFDDKAIKENK
GEGYKKIVYKLLPGANKMLPKVFFSAKSIKFYNPSEDILRIRNHSTHTKNGSPQKGYEKFEFNIE
DCRKFIDFYKQSISKHPEWKDFGFRFSDTQRYNSIDEFYREVENQGYKLTFENISESYIDSVVNQ
GKLYLFQIYNKDFSAYSKGRPNLHTLYWKALFDERNLQDVVYKLNGEAELFYRKQSIPKKITHPA
KEAIANKNKDNPKKESVFEYDLIKDKRFTEDKFFFHCPITINFKSSGANKFNDEINLLLKEKAND
VHILSI [symbol] RGERHLAYYTLVDGKGNIIKQDTFNIIGNDRMKTNYHDKLAAIEKDRDSARKDWKKIN
NIKEMKEGYLSQVVHEIAKLVIEYNAIVVF [symbol] DLNFGFKRGRFKVEKQVYQKLEKMLIEKLNYLVF
KDNEFDKTGGVLRAYQLTAPFETFKKMGKQTGIIYYVPAGFTSKICPVTGFVNQLYPKYESVSKS
QEFFSKFDKICYNLDKGYFEFSFDYKNFGDKAAKGKWTIASFGSRLINFRNSDKNHNWDTREVYP
TKELEKLLKDYSIEYGHGECIKAAICGESDKKFFAKLTSVLNTILQMRNSKTGTELDYLISPVAD
VNGNFFDSRQAPKNMPQDA [symbol] ANGAYHIGLKGLMLLGRIKNNQEGKKLNLVIKNEEYFEFVQNRNN
Francisella novicida Cpf1 D917A (A917, E1006, and D1255 are
bolded and underlined)
MSIYQEFVNKYSLSKTLRFELIPQGKTLENIKARGLILDDEKRAKDYKKAKQIIDKYHQFFIEEI
LSSVCISEDLLQNYSDVYFKLKKSDDDNLQKDFKSAKDTIKKQISEYIKDSEKFKNLFNQNLIDA
KKGQESDLILWLKQSKDNGIELFKANSDITDIDEALEIIKSFKGWTTYFKGFHENRKNVYSSNDI
PTSIIYRIVDDNLPKFLENKAKYESLKDKAPEAINYEQIKKDLAEELTFDIDYKTSEVNQRVFSL
DEVFEIANFNNYLNQSGITKFNTIIGGKFVNGENTKRKGINEYINLYSQQINDKTLKKYKMSVLF
KQILSDTESKSFVIDKLEDDSDVVTTMQSFYEQIAAFKTVEEKSIKETLSLLFDDLKAQKLDLSK
IYFKNDKSLTDLSQQVFDDYSVIGTAVLEYITQQIAPKNLDNPSKKEQELIAKKTEKAKYLSLET
IKLALEEFNKHRDIDKQCRFEEILANFAAIPMIFDEIAQNKDNLAQISIKYQNQGKKDLLQASAE
DDVKAIKDLLDQTNNLLHKLKIFHISQSEDKANILDKDEHFYLVFEECYFELANIVPLYNKIRNY
ITQKPYSDEKFKLNFENSTLANGWDKNKEPDNTAILFIKDDKYYLGVMNKKNNKIFDDKAIKENK
GEGYKKIVYKLLPGANKMLPKVFFSAKSIKFYNPSEDILRIRNHSTHTKNGSPQKGYEKFEFNIE
DCRKFIDFYKQSISKHPEWKDFGFRFSDTQRYNSIDEFYREVENQGYKLTFENISESYIDSVVNQ
GKLYLFQIYNKDFSAYSKGRPNLHTLYWKALFDERNLQDVVYKLNGEAELFYRKQSIPKKITHPA
KEAIANKNKDNPKKESVFEYDLIKDKRFTEDKFFFHCPITINFKSSGANKFNDEINLLLKEKAND
VHILSI [symbol] RGERHLAYYTLVDGKGNIIKQDTFNIIGNDRMKTNYHDKLAAIEKDRDSARKDWKKIN
NIKEMKEGYLSQVVHEIAKLVIEYNAIVVF [symbol] DLNFGFKRGRFKVEKQVYQKLEKMLIEKLNYLVF
KDNEFDKTGGVLRAYQLTAPFETFKKMGKQTGIIYYVPAGFTSKICPVTGFVNQLYPKYESVSKS
QEFFSKFDKICYNLDKGYFEFSFDYKNFGDKAAKGKWTIASFGSRLINFRNSDKNHNWDTREVYP
TKELEKLLKDYSIEYGHGECIKAAICGESDKKFFAKLTSVLNTILQMRNSKTGTELDYLISPVAD
VNGNFFDSRQAPKNMPQDA [symbol] ANGAYHIGLKGLMLLGRIKNNQEGKKLNLVIKNEEYFEFVQNRNN
Francisella novicida Cpf1 E1006A (D917, A1006, and D1255 are
bolded and underlined)
MSIYQEFVNKYSLSKTLRFELIPQGKTLENIKARGLILDDEKRAKDYKKAKQIIDKYHQFFIEEI
LSSVCISEDLLQNYSDVYFKLKKSDDDNLQKDFKSAKDTIKKQISEYIKDSEKFKNLFNQNLIDA
KKGQESDLILWLKQSKDNGIELFKANSDITDIDEALE1IKSFKGWTTYFKGFHENRKNVYSSNDI
PTSIIYRIVDDNLPKFLENKAKYESLKDKAPEAINYEQIKKDLAEELTFDIDYKTSEVNQRVFSL
DEVFEIANFNNYLNQSGITKFNTIIGGKFVNGENTKRKGINEYINLYSQQINDKTLKKYKMSVLF
KQILSDTESKSFVIDKLEDDSDVVTTMQSFYEQIAAFKTVEEKSIKETLSLLFDDLKAQKLDLSK
lYFKNDKSLTDLSQQVFDDYSVIGTAVLEYITQQIAPKNLDNPSKKEQELIAKKTEKAKYLSLET
IKLALEEFNKHRDIDKQCRFEEILANFAAIPMIFDEIAQNKDNLAQISIKYQNQGKKDLLQASAE
DDVKAIKDLLDQTNNLLHKLKIFHISQSEDKANILDKDEHFYLVFEECYFELANIVPLYNKIRNY
ITQKPYSDEKFKLNFENSTLANGWDKNKEPDNTAILFIKDDKYYLGVMNKKNNKIFDDKAIKENK
GEGYKKIVYKLLPGANKMLPKVFFSAKSIKFYNPSEDILRIRNHSTHTKNGSPQKGYEKFEFNIE
DCRKFIDFYKQSISKHPEWKDFGFRFSDTQRYNSIDEFYREVENQGYKLTFENISESYIDSVVNQ
GKLYLFQIYNKDFSAYSKGRPNLHTLYWKALFDERNLQDVVYKLNGEAELFYRKQSIPKKITHPA
KEAIANKNKDNPKKESVFEYDLIKDKRFTEDKFFFHCPITINFKSSGANKFNDEINLLLKEKAND
VHILSI [symbol] RGERHLAYYTLVDGKGNIIKQDTENIIGNDRMKTNYHDKLAAIEKDRDSARKDWKKIN
NIKEMKEGYLSQVVHEIAKLVIEYNAIVVF [symbol] DLNFGFKRGRFKVEKQVYQKLEKMLIEKLNYLVF
KDNEFDKTGGVLRAYQLTAPFETFKKMGKQTGIIYYVPAGFTSKICPVTGFVNQLYPKYESVSKS
QEFFSKFDKICYNLDKGYFEFSFDYKNFGDKAAKGKWTIASFGSRLINFRNSDKNHNWDTREVYP
TKELEKLLKDYSIEYGHGECIKAAICGESDKKFFAKLTSVLNTILQMRNSKTGTELDYLISPVAD
VNGNFFDSRQAPKNMPQDA [symbol] ANGAYHIGLKGLMLLGRIKNNQEGKKLNLVIKNEEYFEFVQNRNN
Francisella novicida Cpf1 D1255A (D917, E1006, and A1255 are
bolded and underlined)
MSIYQEFVNKYSLSKTLRFELIPQGKTLENIKARGLILDDEKRAKDYKKAKQIIDKYHQFFIEEI
LSSVCISEDLLQNYSDVYFKLKKSDDDNLQKDFKSAKDTIKKQISEYIKDSEKFKNLFNQNLIDA
KKGQESDLILWLKQSKDNGIELFKANSDITDIDEALE1IKSFKGWTTYFKGFHENRKNVYSSNDI
PTSIIYRIVDDNLPKFLENKAKYESLKDKAPEAINYEQIKKDLAEELTFDIDYKTSEVNQRVFSL
DEVFEIANFNNYLNQSGITKFNTIIGGKFVNGENTKRKGINEYINLYSQQINDKTLKKYKMSVLF
KQILSDTESKSFVIDKLEDDSDVVTTMQSFYEQIAAFKTVEEKSIKETLSLLFDDLKAQKLDLSK
IYFKNDKSLTDLSQQVFDDYSVIGTAVLEYITQQIAPKNLDNPSKKEQELIAKKTEKAKYLSLET
IKLALEEFNKHRDIDKQCRFEEILANFAAIPMIFDEIAQNKDNLAQISIKYQNQGKKDLLQASAE
DDVKAIKDLLDQTNNLLHKLKIFHISQSEDKANILDKDEHFYLVFEECYFELANIVPLYNKIRNY
ITQKPYSDEKFKLNFENSTLANGWDKNKEPDNTAILFIKDDKYYLGVMNKKNNKIFDDKAIKENK
GEGYKKIVYKLLPGANKMLPKVFFSAKSIKFYNPSEDILRIRNHSTHTKNGSPQKGYEKFEFNIE
DCRKFIDEYKQSISKHPEWKDFGFRFSDTQRYNSIDEFYREVENQGYKLTFENISESYIDSVVNQ
GKLYLFQIYNKDFSAYSKGRPNLHTLYWKALFDERNLQDVVYKLNGEAELFYRKQSIPKKITHPA
KEAIANKNKDNPKKESVFEYDLIKDKRFTEDKFFFHCPITINFKSSGANKFNDEINLLLKEKAND
VHILSI [symbol] RGERHLAYYTLVDGKGNIIKQDTFNIIGNDRMKTNYHDKLAAIEKDRDSARKDWKKIN
NIKEMKEGYLSQVVHEIAKLVIEYNAIVVF [symbol] DLNFGFKRGRFKVEKQVYQKLEKMLIEKLNYLVF
KDNEFDKTGGVLRAYQLTAPFETFKKMGKQTGIIYYVPAGFTSKICPVTGFVNQLYPKYESVSKS
QEFFSKFDKICYNLDKGYFEFSFDYKNFGDKAAKGKWTIASFGSRLINFRNSDKNHNWDTREVYP
TKELEKLLKDYSIEYGHGECIKAAICGESDKKFFAKLTSVLNTILQMRNSKTGTELDYLISPVAD
VNGNFFDSRQAPKNMPQDA [symbol] ANGAYHIGLKGLMLLGRIKNNQEGKKLNLVIKNEEYFEFVQNRNN
Francisella novicida Cpf1 D917A/E1006A (A917, A1006, and D1255
are bolded and underlined)
MSIYQEFVNKYSLSKTLRFELIPQGKTLENIKARGLILDDEKRAKDYKKAKQIIDKYHQFFIEEI
LSSVCISEDLLQNYSDVYFKLKKSDDDNLQKDFKSAKDTIKKQISEYIKDSEKFKNLFNQNLIDA
KKGQESDLILWLKQSKDNGIELFKANSDITDIDEALE1IKSFKGWTTYFKGFHENRKNVYSSNDI
PTSIIYRIVDDNLPKFLENKAKYESLKDKAPEAINYEQIKKDLAEELTFDIDYKTSEVNQRVFSL
DEVFEIANENNYLNQSGITKENTIIGGKFVNGENTKRKGINEYINLYSQQINDKTLKKYKMSVLE
KQILSDTESKSFVIDKLEDDSDVVTTMQSFYEQIAAFKTVEEKSIKETLSLLFDDLKAQKLDLSK
IYFKNDKSLTDLSQQVFDDYSVIGTAVLEYITQQIAPKNLDNPSKKEQELIAKKTEKAKYLSLET
IKLALEEFNKHRDIDKQCRFEEILANFAAIPMIFDEIAQNKDNLAQISIKYQNQGKKDLLQASAE
DDVKAIKDLLDQTNNLLHKLKIFHISQSEDKANILDKDEHFYLVFEECYFELANIVPLYNKIRNY
ITQKPYSDEKFKLNFENSTLANGWDKNKEPDNTAILFIKDDKYYLGVMNKKNNKIFDDKAIKENK
GEGYKKIVYKLLPGANKMLPKVFFSAKSIKFYNPSEDILRIRNHSTHTKNGSPQKGYEKFEFNIE
DCRKFIDFYKQSISKHPEWKDFGFRFSDTQRYNSIDEFYREVENQGYKLTFENISESYIDSVVNQ
GKLYLFQIYNKDFSAYSKGRPNLHTLYWKALFDERNLQDVVYKLNGEAELFYRKQSIPKKITHPA
KEAIANKNKDNPKKESVFEYDLIKDKRFTEDKFFFHCPITINFKSSGANKFNDEINLLLKEKAND
VHILSI [symbol] RGERHLAYYTLVDGKGNIIKQDTFNIIGNDRMKTNYHDKLAAIEKDRDSARKDWKKIN
NIKEMKEGYLSQVVHEIAKLVIEYNAIVVF [symbol] DLNFGFKRGRFKVEKQVYQKLEKMLIEKLNYLVF
KDNEFDKTGGVLRAYQLTAPFETFKKMGKQTGIIYYVPAGFTSKICPVTGFVNQLYPKYESVSKS
QEFFSKFDKICYNLDKGYFEFSFDYKNFGDKAAKGKWTIASFGSRLINFRNSDKNHNWDTREVYP
TKELEKLLKDYSIEYGHGECIKAAICGESDKKFFAKLTSVLNTILQMRNSKTGTELDYLISPVAD
VNGNFFDSRQAPKNMPQDA [symbol] ANGAYHIGLKGLMLLGRIKNNQEGKKLNLVIKNEEYFEFVQNRNN
Francisella novicida Cpf1 D917A/D1255A (A917, E1006, and A1255
are bolded and underlined)
MSIYQEFVNKYSLSKTLRFELIPQGKTLENIKARGLILDDEKRAKDYKKAKQIIDKYHQFFIEEI
LSSVCISEDLLQNYSDVYFKLKKSDDDNLQKDFKSAKDTIKKQISEYIKDSEKFKNLFNQNLIDA
KKGQESDLILWLKQSKDNGIELFKANSDITDIDEALEIIKSFKGWTTYFKGFHENRKNVYSSNDI
PTSIIYRIVDDNLPKFLENKAKYESLKDKAPEAINYEQIKKDLAEELTFDIDYKTSEVNQRVFSL
DEVFEIANFNNYLNQSGITKFNTIIGGKFVNGENTKRKGINEYINLYSQQINDKTLKKYKMSVLF
KQILSDTESKSFVIDKLEDDSDVVTTMQSFYEQIAAFKTVEEKSIKETLSLLFDDLKAQKLDLSK
IYFKNDKSLTDLSQQVFDDYSVIGTAVLEYITQQIAPKNLDNPSKKEQELIAKKTEKAKYLSLET
IKLALEEFNKHRDIDKQCRFEEILANFAAIPMIFDEIAQNKDNLAQISIKYQNQGKKDLLQASAE
DDVKAIKDLLDQTNNLLHKLKIFHISQSEDKANILDKDEHFYLVFEECYFELANIVPLYNKIRNY
ITQKPYSDEKFKLNFENSTLANGWDKNKEPDNTAILFIKDDKYYLGVMNKKNNKIFDDKAIKENK
GEGYKKIVYKLLPGANKMLPKVFFSAKSIKFYNPSEDILRIRNHSTHTKNGSPQKGYEKFEFNIE
DCRKFIDFYKQSISKHPEWKDFGFRFSDTQRYNSIDEFYREVENQGYKLTFENISESYIDSVVNQ
GKLYLFQIYNKDFSAYSKGRPNLHTLYWKALFDERNLQDVVYKLNGEAELFYRKQSIPKKITHPA
KEAIANKNKDNPKKESVFEYDLIKDKRFTEDKFFFHCPITINFKSSGANKFNDEINLLLKEKAND
VHILSI [symbol] RGERHLAYYTLVDGKGNIIKQDTFNIIGNDRMKTNYHDKLAAIEKDRDSARKDWKKIN
NIKEMKEGYLSQVVHEIAKLVIEYNAIVVF [symbol] DLNFGFKRGRFKVEKQVYQKLEKMLIEKLNYLVF
KDNEFDKTGGVLRAYQLTAPFETFKKMGKQTGIIYYVPAGETSKICPVTGEVNQLYPKYESVSKS
QEFFSKFDKICYNLDKGYFEFSFDYKNFGDKAAKGKWTIASFGSRLINFRNSDKNHNWDTREVYP
TKELEKLLKDYSIEYGHGECIKAAICGESDKKFFAKLTSVLNTILQMRNSKTGTELDYLISPVAD
VNGNFFDSRQAPKNMPQDA [symbol] ANGAYHIGLKGLMLLGRIKNNQEGKKLNLVIKNEEYFEFVQNRNN
Francisella novicida Cpf1 E1006A/D1255A (D917, A1006, and A1255
are bolded and underlined)
MSIYQEFVNKYSLSKTLRFELIPQGKTLENIKARGLILDDEKRAKDYKKAKQIIDKYHQFFIEEI
LSSVCISEDLLQNYSDVYFKLKKSDDDNLQKDFKSAKDTIKKQISEYIKDSEKFKNLFNQNLIDA
KKGQESDLILWLKQSKDNGIELFKANSDITDIDEALE1IKSFKGWTTYFKGFHENRKNVYSSNDI
PTSIIYRIVDDNLPKFLENKAKYESLKDKAPEAINYEQIKKDLAEELTFDIDYKTSEVNQRVFSL
DEVFEIANFNNYLNQSGITKFNTIIGGKFVNGENTKRKGINEYINLYSQQINDKTLKKYKMSVLF
KQILSDTESKSFVIDKLEDDSDVVTTMQSFYEQIAAFKTVEEKSIKETLSLLFDDLKAQKLDLSK
IYFKNDKSLTDLSQQVFDDYSVIGTAVLEYITQQIAPKNLDNPSKKEQELIAKKTEKAKYLSLET
IKLALEEFNKHRDIDKQCRFEEILANFAAIPMIFDEIAQNKDNLAQISIKYQNQGKKDLLQASAE
DDVKAIKDLLDQTNNLLHKLKIFHISQSEDKANILDKDEHFYLVFEECYFELANIVPLYNKIRNY
ITQKPYSDEKFKLNFENSTLANGWDKNKEPDNTAILFIKDDKYYLGVMNKKNNKIFDDKAIKENK
GEGYKKIVYKLLPGANKMLPKVFFSAKSIKFYNPSEDILRIRNHSTHTKNGSPQKGYEKFEFNIE
DCRKFIDEYKQSISKHPEWKDFGFRFSDTQRYNSIDEFYREVENQGYKLTFENISESYIDSVVNQ
GKLYLFQIYNKDFSAYSKGRPNLHTLYWKALFDERNLQDVVYKLNGEAELFYRKQSIPKKITHPA
KEAIANKNKDNPKKESVFEYDLIKDKRFTEDKFFFHCPITINFKSSGANKFNDEINLLLKEKAND
VHILSI [symbol] RGERHLAYYTLVDGKGNIIKQDTFNIIGNDRMKTNYHDKLAAIEKDRDSARKDWKKIN
NIKEMKEGYLSQVVHEIAKLVIEYNAIVVF [symbol] DLNFGFKRGRFKVEKQVYQKLEKMLIEKLNYLVF
KDNEFDKTGGVLRAYQLTAPFETFKKMGKQTGIIYYVPAGFTSKICPVTGFVNQLYPKYESVSKS
QEFFSKFDKICYNLDKGYFEFSFDYKNFGDKAAKGKWTIASFGSRLINFRNSDKNHNWDTREVYP
TKELEKLLKDYSIEYGHGECIKAAICGESDKKFFAKLTSVLNTILQMRNSKTGTELDYLISPVAD
VNGNFFDSRQAPKNMPQDA [symbol] ANGAYHIGLKGLMLLGRIKNNQEGKKLNLVIKNEEYFEFVQNRNN
Francisella novicida Cpf1 D917A/E1006A/D1255A (A917, A1006,
and A1255 are bolded and underlined)
MSIYQEFVNKYSLSKTLRFELIPQGKTLENIKARGLILDDEKRAKDYKKAKQIIDKYHQFFIEEI
LSSVCISEDLLQNYSDVYFKLKKSDDDNLQKDFKSAKDTIKKQISEYIKDSEKFKNLFNQNLIDA
KKGQESDLILWLKQSKDNGIELFKANSDITDIDEALE1IKSFKGWTTYFKGFHENRKNVYSSNDI
PTSIIYRIVDDNLPKFLENKAKYESLKDKAPEAINYEQIKKDLAEELTFDIDYKTSEVNQRVFSL
DEVFEIANFNNYLNQSGITKFNTIIGGKFVNGENTKRKGINEYINLYSQQINDKTLKKYKMSVLF
KQILSDTESKSFVIDKLEDDSDVVTTMQSFYEQIAAFKTVEEKSIKETLSLLFDDLKAQKLDLSK
IYFKNDKSLTDLSQQVFDDYSVIGTAVLEYITQQIAPKNLDNPSKKEQELIAKKTEKAKYLSLET
IKLALEEFNKHRDIDKQCRFEEILANFAAIPMIFDEIAQNKDNLAQISIKYQNQGKKDLLQASAE
DDVKAIKDLLDQTNNLLHKLKIFHISQSEDKANILDKDEHFYLVFEECYFELANIVPLYNKIRNY
ITQKPYSDEKFKLNFENSTLANGWDKNKEPDNTAILFIKDDKYYLGVMNKKNNKIFDDKAIKENK
GEGYKKIVYKLLPGANKMLPKVFFSAKSIKFYNPSEDILRIRNHSTHTKNGSPQKGYEKFEFNIE
DCRKFIDFYKQSISKHPEWKDFGFRFSDTQRYNSIDEFYREVENQGYKLTFENISESYIDSVVNQ
GKLYLFQIYNKDFSAYSKGRPNLHTLYWKALFDERNLQDVVYKLNGEAELFYRKQSIPKKITHPA
KEAIANKNKDNPKKESVFEYDLIKDKRFTEDKFFFHCPITINFKSSGANKFNDEINLLLKEKAND
VHILSI [symbol] RGERHLAYYTLVDGKGNIIKQDTFNIIGNDRMKTNYHDKLAAIEKDRDSARKDWKKIN
NIKEMKEGYLSQVVHEIAKLVIEYNAIVVF [symbol] DLNFGFKRGRFKVEKQVYQKLEKMLIEKLNYLVF
KDNEFDKTGGVLRAYQLTAPFETFKKMGKQTGIIYYVPAGFTSKICPVTGFVNQLYPKYESVSKS
QEFFSKFDKICYNLDKGYFEFSFDYKNFGDKAAKGKWTIASFGSRLINFRNSDKNHNWDTREVYP
TKELEKLLKDYSIEYGHGECIKAAICGESDKKFFAKLTSVLNTILQMRNSKTGTELDYLISPVAD
VNGNFFDSRQAPKNMPQDA [symbol] ANGAYHIGLKGLMLLGRIKNNQEGKKLNLVIKNEEYFEFVONRNN

[0253] In some embodiments, one of the Cas9 domains present in the fusion protein may be replaced with a guide nucleotide sequence-programmable DNA-binding protein domain that has no requirements for a PAM sequence.

[0254] In some embodiments, the nucleic acid programmable DNA binding protein (napDNAbp) is a single effector of a microbial CRISPR-Cas system. Single effectors of microbial CRISPR-Cas systems include, without limitation, Cas9, Cpf1, Cas12b/C2c1, and Cas12c/C2c3. Typically, microbial CRISPR-Cas systems are divided into Class 1 and Class 2 systems. Class 1 systems have multisubunit effector complexes, while Class 2 systems have a single protein effector. For example, Cas9 and Cpf1 are Class 2 effectors. In addition to Cas9 and Cpf1, three distinct Class 2 CRISPR-Cas systems (Cas12b/C2c1, and Cas12c/C2c3) have been described by Shmakov et al., “Discovery and Functional Characterization of Diverse Class 2 CRISPR Cas Systems”, Mol. Cell, 2015 Nov. 5; 60(3): 385-397, the entire contents of which is hereby incorporated by reference. Effectors of two of the systems, Cas12b/C2c1, and Cas12c/C2c3, contain RuvC-like endonuclease domains related to Cpf1. A third system, contains an effector with two predicated HEPN RNase domains. Production of mature CRISPR RNA is tracrRNA-independent, unlike production of CRISPR RNA by Cas12b/C2c1. Cas12b/C2c1 depends on both CRISPR RNA and tracrRNA for DNA cleavage.

[0255] The crystal structure of Alicyclobaccillus acidoterrastris Cas12b/C2c1 (AacC2c1) has been reported in complex with a chimeric single-molecule guide RNA (sgRNA). See e.g., Liu et al., “C2c1-sgRNA Complex Structure Reveals RNA-Guided DNA Cleavage Mechanism”, Mol. Cell, 2017 Jan. 19; 65(2):310-322, the entire contents of which are hereby incorporated by reference. The crystal structure has also been reported in Alicyclobacillus acidoterrestris C2c1 bound to target DNAs as ternary complexes. See e.g., Yang et al., “PAM-dependent Target DNA Recognition and Cleavage by C2C1 CRISPR-Cas endonuclease”, Cell, 2016 Dec. 15; 167(7):1814-1828, the entire contents of which are hereby incorporated by reference. Catalytically competent conformations of AacC2c1, both with target and non-target DNA strands, have been captured independently positioned within a single RuvC catalytic pocket, with Cas12b/C2c1-mediated cleavage resulting in a staggered seven-nucleotide break of target DNA. Structural comparisons between Cas12b/C2c1 ternary complexes and previously identified Cas9 and Cpf1 counterparts demonstrate the diversity of mechanisms used by CRISPR-Cas9 systems. In some embodiments, the nucleic acid programmable DNA binding protein (napDNAbp) of any of the fusion proteins provided herein may be a Cas12b/C2c1, or a Cas12c/C2c3 protein. In some embodiments, the napDNAbp is a Cas12b/C2c1 protein. In some embodiments, the napDNAbp is a Cas12c/C2c3 protein. In some embodiments, the napDNAbp comprises an amino acid sequence that is at least 85%, at least 90%, at least 91%, at least 92%, at least 93%, at least 94%, at least 95%, at least 96%, at least 97%, at least 98%, at least 99%, or at ease 99.5% identical to a naturally-occurring Cas12b/C2c1 or Cas12c/C2c3 protein. In some embodiments, the napDNAbp is a naturally-occurring Cas12b/C2c1 or Cas12c/C2c3 protein. In some embodiments, the napDNAbp comprises an amino acid sequence that is at least 85%, at least 90%, at least 91%, at least 92%, at least 93%, at least 94%, at least 95%, at least 96%, at least 97%, at least 98%, at least 99%, or at ease 99.5% identical to any one of the napDNAbp sequences provided herein. It should be appreciated that Cas12b/C2c1 or Cas12c/C2c3 from other bacterial species may also be used in accordance with the present disclosure.

[0256] A Cas12b/C2c1 ((uniprot.org/uniprot/TOD7A2#2) sp|T0D7A2|/C2C1_ALIAG CRISPR-associated endo-nuclease C2c1 OS==Alicyclobacillus acido-terrestris ((strain ATCC 49025/DSM 3922/CIP 106132/NCIMB 13137/GD3B) GN=c2c1 PE=1 SV=1)) amino acid sequence is as follows:

MAVKSIKVKLRLDDMPEIRAGLWKLHKEVNAGVRYYTEWLSLLRQENLY
ERRSPNGDGEQECDKTAECKAELLERLRARQVENGHRGPAGSDDELLQL
ARQLYELLVPQAIGAKGDAQQIARKFLSPLADKDAVGGLGIAKAGNKPR
WVRMREAGEPGWEEEKEKAETRKSADRTADVLRALADFGLKPLMRVYTD
SEMSSVEWKPLRKGQAVRTWDRDMFQQAIERMMSWESWNQRVGQEYAKL
VEQKNRFEQKNFVGQEHLVHLVNQLQQDMKEASPGLESKEQTAHYVTGR
ALRGSDKVFEKWGKLAPDAPFDLYDAEIKNVQRRNTRRFGSHDLFAKLA
EPEYQALWREDASFLTRYAVYNSILRKLNHAKMFATFTLPDATAHPIWT
RFDKLGGNLHQYTFLFNEFGERRHAIRFHKLLKVENGVAREVDDVTVPI
SMSEQLDNLLPRDPNEPIALYFRDYGAEQHFTGEFGGAKIQCRRDQLAH
MHRRRGARDVYLNVSVRVQSQSEARGERRPPYAAVFRLVGDNHRAFVHF
DKLSDYLAEHPDDGKLGSEGLLSGLRVMSVDLGLRTSASISVFRVARKD
ELKPNSKGRVPFFFPIKGNDNLVAVHERSQLLKLPGETESKDLRAIREE
RQRTLRQLRTQLAYLRLLVRCGSEDVGRRERSWAKLIEQPVDAANHMTP
DWREAFENELQKLKSLHGICSDKEWMDAVYESVRRVWRHMGKQVRDWRK
DVRSGERPKIRGYAKDVVGGNSIEQIEYLERQYKFLKSWSFFGKVSGQV
IRAEKGSRFAITLREHIDHAKEDRLKKLADRIIMEALGYVYALDERGKG
KWVAKYPPCQLILLEELSEYQFNNDRPPSENNQLMQWSHRGVFQELINQ
AQVHDLLVGTMYAAFSSRFDARTGAPGIRCRRVPARCTQEHNPEPFPWW
LNKFVVEHTLDACPLRADDLIPTGEGEIFVSPFSAEEGDFHQIHADLNA
AQNLQQRLWSDFDISQIRLRCDWGEVDGELVLIPRLTGKRTADSYSNKV
FYTNTGVTYYERERGKKRRKVFAQEKLSEEEAELLVEADEAREKSVVLM
RDPSGIINRGNWTRQKEFWSMV NQRIEGYLVKQIRSRVPLQDSACENT
GDI
BhCas12b (Bacillus hisashii) NCBI Reference
Sequence: WP_095142515
MAPKKKRKVGIHGVPAAATRSFILKIEPNEEVKKGLWKTHEVLNHGIAY
YMNILKLIRQEAIYEHHEQDPKNPKKVSKAEIQAELWDFVLKMQKCNSF
THEVDKDEVFNILRELYEELVPSSVEKKGEANQLSNKFLYPLVDPNSQS
GKGTASSGRKPRWYNLKIAGDPSWEEEKKKWEEDKKKDPLAKILGKLAE
YGLIPLFIPYTDSNEPIVKEIKWMEKSRNQSVRRLDKDMFIQALERFLS
WESWNLKVKEEYEKVEKEYKTLEERIKEDIQALKALEQYEKERQEQLLR
DTLNTNEYRLSKRGLRGWREIIQKWLKMDENEPSEKYLEVFKDYQRKHP
REAGDYSVYEFLSKKENHFIWRNHPEYPYLYATFCEIDKKKKDAKQQAT
FTLADPINHPLWVRFEERSGSNLNKYRILTEQLHTEKLKKKLTVQLDRL
IYPTESGGWEEKGKVDIVLLPSRQFYNQIFLDIEEKGKHAFTYKDESIK
FPLKGTLGGARVQFDRDHLRRYPHKVESGNVGRIYFNMTVNIEPTESPV
SKSLKIHRDDFPKVVNFKPKELTEWIKDSKGKKLKSGIESLEIGLRVMS
IDLGQRQAAAASIFEVVDQKPDIEGKLFFPIKGTELYAVHRASFNIKLP
GETLVKSREVLRKAREDNLKLMNQKLNFLRNVLHFQQFEDITEREKRVT
KWISRQENSDVPLVYQDELIQIRELMYKPYKDWVAFLKQLHKRLEVEIG
KEVKHWRKSLSDGRKGLYGISLKNIDEIDRTRKFLLRWSLRPTEPGEVR
RLEPGQRFAIDQLNHLNALKEDRLKKMANTIIMHALGYCYDVRKKKWQA
KNPACQIILFEDLSNYNPYEERSRFENSKLMKWSRREIPRQVALQGEIY
GLQVGEVGAQFSSRFHAKTGSPGIRCSVVTKEKLQDNRFFKNLQREGRL
TLDKIAVLKEGDLYPDKGGEKFISLSKDRKCVTTHADINAAQNLQKRFW
TRTHGFYKVYCKAYQVDGQTVYIPESKDQKQKIIEEFGEGYFILKDGVY
EWVNAGKLKIKKGSSKQSSSELVDSDILKDSFDLASELKGEKLMLYRDP
SGNVFPSDKWMAAGVFFGKLERILISKLTNQYSISTIEDDSSKQSMKRP
AATKKAGQAKKKK

[0257] In some embodiments, the Cas12b is BvCas12b V4, which is a variant of BhCas12b and comprises the following changes relative to BhCas12B: S893R, K846R, and E837G. BhCas12b (V4) is expressed as follows:

5′ mRNA Cap---5′UTR---bhCas12b---STOP sequence---
3′UTR---120polyA tail
5′UTR:
GGGAAATAAGAGAGAAAAGAAGAGTAAGAAGAAATATAAGAGCCACC
3′UTR (TriLink standard UTR)
GCTGGAGCCTCGGTGGCCATGCTTCTTGCCCCTTGGGCCTCCCCCCAGCC
CCTCCTCCCCTTCCTGCACCCGTACCCCCGTGGTCTTTGAATAAAGTCTG
A
Nucleic acid sequence of bhCas12b (V4)
ATGGCCCCAAAGAAGAAGCGGAAGGTCGGTATCCACGGAGTCCCAGCAGC
CGCCACCAGATCCTTCATCCTGAAGATCGAGCCCAACGAGGAAGTGAAGA
AAGGCCTCTGGAAAACCCACGAGGTGCTGAACCACGGAATCGCCTACTAC
ATGAATATCCTGAAGCTGATCCGGCAAGAGGCCATCTACGAGCACCACGA
GCAGGACCCCAAGAATCCCAAGAAGGTGTCCAAGGCCGAGATCCAGGCCG
AGCTGTGGGATTTCGTGCTGAAGATGCAGAAGTGCAACAGCTTCACACAC
GAGGTGGACAAGGACGAGGTGTTCAACATCCTGAGAGAGCTGTACGAGGA
ACTGGTGCCCAGCAGCGTGGAAAAGAAGGGCGAAGCCAACCAGCTGAGCA
ACAAGTTTCTGTACCCTCTGGTGGACCCCAACAGCCAGTCTGGAAAGGGA
ACAGCCAGCAGCGGCAGAAAGCCCAGATGGTACAACCTGAAGATTGCCGG
CGATCCCTCCTGGGAAGAAGAGAAGAAGAAGTGGGAAGAAGATAAGAAAA
AGGACCCGCTGGCCAAGATCCTGGGCAAGCTGGCTGAGTACGGACTGATC
CCTCTGTTCATCCCCTACACCGACAGCAACGAGCCCATCGTGAAAGAAAT
CAAGTGGATGGAAAAGTCCCGGAACCAGAGCGTGCGGCGGCTGGATAAGG
ACATGTTCATTCAGGCCCTGGAACGGTTCCTGAGCTGGGAGAGCTGGAAC
CTGAAAGTGAAAGAGGAATACGAGAAGGTCGAGAAAGAGTACAAGACCCT
GGAAGAGAGGATCAAAGAGGACATCCAGGCTCTGAAGGCTCTGGAACAGT
ATGAGAAAGAGCGGCAAGAACAGCTGCTGCGGGACACCCTGAACACCAAC
GAGTACCGGCTGAGCAAGAGAGGCCTTAGAGGCTGGCGGGAAATCATCCA
GAAATGGCTGAAAATGGACGAGAACGAGCCCTCCGAGAAGTACCTGGAAG
TGTTCAAGGACTACCAGCGGAAGCACCCTAGAGAGGCCGGCGATTACAGC
GTGTACGAGTTCCTGTCCAAGAAAGAGAACCACTTCATCTGGCGGAATCA
CCCTGAGTACCCCTACCTGTACGCCACCTTCTGCGAGATCGAGAAGAAAA
AGAAGGAGGCCAAGCAGCAGGCCACCTTCACACTGGCCGATCCTATCAAT
CACCCTCTGTGGGTCCGATTCGAGGAAAGAAGCGGCAGCAACCTGAACAA
GTACAGAATCCTGACCGAGCAGCTGCACACCGAGAAGCTGAAGAAAAAGC
TGACAGTGCAGCTGGACCGGCTGATCTACCCTACAGAATCTGGCGGCTGG
GAAGAGAAGGGCAAAGTGGACATTGTGCTGCTGCCCAGCCGGCAGTTCTA
CAACCAGATCTTCCTGGACATCGAGGAAAAGGGCAAGCACGCCTTCACCT
ACAAGGATGAGAGCATCAAGTTCCCTCTGAAGGGCACACTCGGCGGAGCC
AGAGTGCAGTTCGACAGAGATCACCTGAGAAGATACCCTCACAAGGTGGA
AAGCGGCAACGTGGGCAGAATCTACTTCAACATGACCGTGAACATCGAGC
CTACAGAGTCCCCAGTGTCCAAGTCTCTGAAGATCCACCGGGACGACTTC
CCCAAGGTGGTCAACTTCAAGCCCAAAGAACTGACCGAGTGGATCAAGGA
CAGCAAGGGCAAGAAACTGAAGTCCGGCATCGAGTCCCTGGAAATCGGCC
TGAGAGTGATGAGCATCGACCTGGGACAGAGACAGGCCGCTGCCGCCTCT
ATTTTCGAGGTGGTGGATCAGAAGCCCGACATCGAAGGCAAGCTGTTTTT
CCCAATCAAGGGCACCGAGCTGTATGCCGTGCACAGAGCCAGCTTCAACA
TCAAGCTGCCCGGCGAGACACTGGTCAAGAGCAGAGAAGTGCTGCGGAAG
GCCAGAGAGGACAATCTGAAACTGATGAACCAGAAGCTCAACTTCCTGCG
GAACGTGCTGCACTTCCAGCAGTTCGAGGACATCACCGAGAGAGAGAAGC
GGGTCACCAAGTGGATCAGCAGACAAGAGAACAGCGACGTGCCCCTGGTG
TACCAGGATGAGCTGATCCAGATCCGCGAGCTGATGTACAAGCCTTACAA
GGACTGGGTCGCCTTCCTGAAGCAGCTCCACAAGAGACTGGAAGTCGAGA
TCGGCAAAGAAGTGAAGCACTGGCGGAAGTCCCTGAGCGACGGAAGAAAG
GGCCTGTACGGCATCTCCCTGAAGAACATCGACGAGATCGATCGGACCCG
GAAGTTCCTGCTGAGATGGTCCCTGAGGCCTACCGAACCTGGCGAAGTGC
GTAGACTGGAACCCGGCCAGAGATTCGCCATCGACCAGCTGAATCACCTG
AACGCCCTGAAAGAAGATCGGCTGAAGAAGATGGCCAACACCATCATCAT
GCACGCCCTGGGCTACTGCTACGACGTGCGGAAGAAGAAATGGCAGGCTA
AGAACCCCGCCTGCCAGATCATCCTGTTCGAGGATCTGAGCAACTACAAC
CCCTACGAGGAAAGGTCCCGCTTCGAGAACAGCAAGCTCATGAAGTGGTC
CAGACGCGAGATCCCCAGACAGGTTGCACTGCAGGGCGAGATCTATGGCC
TGCAAGTGGGAGAAGTGGGCGCTCAGTTCAGCAGCAGATTCCACGCCAAG
ACAGGCAGCCCTGGCATCAGATGTAGCGTCGTGACCAAAGAGAAGCTGCA
GGACAATCGGTTCTTCAAGAATCTGCAGAGAGAGGGCAGACTGACCCTGG
ACAAAATCGCCGTGCTGAAAGAGGGCGATCTGTACCCAGACAAAGGCGGC
GAGAAGTTCATCAGCCTGAGCAAGGATCGGAAGTGCGTGACCACACACGC
CGACATCAACGCCGCTCAGAACCTGCAGAAGCGGTTCTGGACAAGAACCC
ACGGCTTCTACAAGGTGTACTGCAAGGCCTACCAGGTGGACGGCCAGACC
GTGTACATCCCTGAGAGCAAGGACCAGAAGCAGAAGATCATCGAAGAGTT
CGGCGAGGGCTACTTCATTCTGAAGGACGGGGTGTACGAATGGGTCAACG
CCGGCAAGCTGAAAATCAAGAAGGGCAGCTCCAAGCAGAGCAGCAGCGAG
CTGGTGGATAGCGACATCCTGAAAGACAGCTTCGACCTGGCCTCCGAGCT
GAAAGGCGAAAAGCTGATGCTGTACAGGGACCCCAGCGGCAATGTGTTCC
CCAGCGACAAATGGATGGCCGCTGGCGTGTTCTTCGGAAAGCTGGAACGC
ATCCTGATCAGCAAGCTGACCAACCAGTACTCCATCAGCACCATCGAGGA
CGACAGCAGCAAGCAGTCTATGAAAAGGCCGGCGGCCACGAAAAAGGCCG
GCCAGGCAAAAAAGAAAAAG

[0258] In some embodiments, the Cas12b is BvCas12B. In some embodiments, the Cas12b comprises amino acid substitutions S893R, K846R, and E837G as numbered in the BvCas12b exemplary sequence provided below.

BvCasl2b (Bacillus sp. V3-13) NCBI Reference
Sequence: WP_101661451.1
MAIRSIKLKMKTNSGTDSIYLRKALWRTHQLINEGIAYYMNLLTLYRQ
EAIGDKTKEAYQAELINIIRNQQRNNGSSEEHGSDQEILALLRQLYEL
IIPSSIGESGDANQLGNKFLYPLVDPNSQSGKGTSNAGRKPRWKRLKE
EGNPDWELEKKKDEERKAKDPTVKIFDNLNKYGLLPLFPLFTNIQKDI
EWLPLGKRQSVRKWDKDMFIQAIERLLSWESWNRRVADEYKQLKEKTE
SYYKEHLTGGEEWIEKIRKFEKERNMELEKNAFAPNDGYFITSRQIRG
WDRVYEKWSKLPESASPEELVVKWAEQQNKMSEGFGDPKVFSFLANRE
NRDIWRGHSERIYHIAAYNGLQKKLSRTKEQATFTLPDAIEHPLWIRY
ESPGGTNLNLFKLEEKQKKNYYVTLSKIIWPSEEKWIEKENIEIFLAP
SIQFNRQIKLKQHVKGKQEISESDYSSRISLDGVLGGSRIQFNRKYIK
NHKELLGEGDIGPVFFNLVVDVAPLQETRNGRLQSPIGKALKVISSDF
SKVIDYKPKELMDWMNTGSASNSFGVASLLEGMRVMSIDMGQRTSASV
SIFEVVKELPKDQEQKLFYSINDTELFAIHKRSFLLNLPGEVVTKNNK
QQRQERRKKRQFVRSQIRMLANVLRLETKKTPDERKKAIHKLMEIVQS
YDSWTASQKEVWEKELNLLTNMAAFNDEIWKESLVELHHRIEPYVGQI
VSKWRKGLSEGRKNLAGISMWNIDELEDTRRLLISWSKRSRTPGEANR
IETDEPFGSSLLQHIQNVKDDRLKQMANLIIMTALGFKYDKEEKDRYK
RWKETYPACQIILFENLNRYLFNLDRSRRENSRLMKWAHRSIPRTVSM
QGEMFGLQVGDVRSEYSSRFHAKTGAPGIRCHALTEEDLKAGSNTLKR
LIEDGFINESELAYLKKGDIIPSQGGELFVTLSKRYKKDSDNNELTVI
HADINAAQNLQKRFWQQNSEVYRVPCQLARMGEDKLYIPKSQTETIKK
YFGKGSFVKNNTEQEVYKWEKSEKMKIKTDTTFDLQDLDGFEDISKTI
ELAQEQQKKYLTMFRDPSGYFFNNETWRPQKEYWSIVNNIIKSCLKKK
ILSNKVEL.
In some embodiments, the Cas12b is
BTCasl2b.BTCasl2b (Bacillus thermoamylovorans)
NCBI Reference Sequence: WP_041902512
MATRSFILKIEPNEEVKKGLWKTHEVLNHGIAYYMNILKLIRQEAIYE
HHEQDPKNPKKVSKAEIQAELWDFVLKMQKCNSFTHEVDKDVVFNILR
ELYEELVPSSVEKKGEANQLSNKFLYPLVDPNSQSGKGTASSGRKPRW
YNLKIAGDPSWEEEKKKWEEDKKKDPLAKILGKLAEYGLIPLFIPFTD
SNEPIVKEIKWMEKSRNQSVRRLDKDMFIQALERFLSWESWNLKVKEE
YEKVEKEHKTLEERIKEDIQAFKSLEQYEKERQEQLLRDTLNTNEYRL
SKRGLRGWREI1QKWLKMDENEPSEKYLEVFKDYQRKHPREAGDYSVY
EFLSKKENHFIWRNHPEYPYLYATFCEIDKKKKDAKQQATFTLADPIN
HPLWVRFEERSGSNLNKYRILTEQLHTEKLKKKLTVQLDRLIYPTESG
GWEEKGKVDIVLLPSRQFYNQIFLDIEEKGKHAFTYKDESIKFPLKGT
LGGARVQFDRDHLRRYPHKVESGNVGRIYFNMTVNIEPTESPVSKSLK
IHRDDFPKFVNFKPKELTEWIKDSKGKKLKSGIESLEIGLRVMSIDLG
QRQAAAASIFEVVDQKPDIEGKLFFPIKGTELYAVHRASFNIKLPGET
LVKSREVLRKAREDNLKLMNQKLNFLRNVLHFQQFEDITEREKRVTKW
ISRQENSDVPLVYQDELIQIRELMYKPYKDWVAFLKQLHKRLEVEIGK
EVKHWRKSLSDGRKGLYGISLKNIDEIDRTRKFLLRWSLRPTEPGEVR
RLEPGQRFAIDQLNHLNALKEDRLKKMANTIIMHALGYCYDVRKKKWQ
AKNPACQIILFEDLSNYNPYEERSRFENSKLMKWSRREIPRQVALQGE
IYGLQVGEVGAQFSSRFHAKTGSPGIRCSVVTKEKLQDNRFFKNLQRE
GRLTLDKIAVLKEGDLYPDKGGEKFISLSKDRKLVTTHADINAAQNLQ
KRFWTRTHGFYKVYCKAYQVDGQTVYIPESKDQKQKIIEEFGEGYFIL
KDGVYEWGNAGKLKIKKGSSKQSSSELVDSDILKDSFDLASELKGEKL
MLYRDPSGNVFPSDKWMAAGVFFGKLERILISKLTNQYSISTIEDDSS
KQSM

[0259] In some embodiments, a napDNAbp refers to Cas12c. In some embodiments, the Cas12c protein is a Cas12c1 or a variant of Cas12c1. In some embodiments, the Cas12 protein is a Cas12c2 or a variant of Cas12c2. In some embodiments, the Cas12 protein is a Cas12c protein from Oleiphilus sp. HI0009 (i.e., OspCas12c) or a variant of OspCas12c. These Cas12c molecules have been described in Yan et al., “Functionally Diverse Type V CRISPR-Cas Systems,” Science, 2019 Jan. 4; 363: 88-91; the entire contents of which is hereby incorporated by reference. In some embodiments, the napDNAbp comprises an amino acid sequence that is at least 85%, at least 90%, at least 91%, at least 92%, at least 93%, at least 94%, at least 95%, at least 96%, at least 97%, at least 98%, at least 99%, or at least 99.5% identical to a naturally-occurring Cas12c1, Cas12c2, or OspCas12c protein. In some embodiments, the napDNAbp is a naturally-occurring Cas12c1, Cas12c2, or OspCas12c protein. In some embodiments, the napDNAbp comprises an amino acid sequence that is at least 85%, at least 90%, at least 91%, at least 92%, at least 93%, at least 94%, at least 95%, at least 96%, at least 97%, at least 98%, at least 99%, or at ease 99.5% identical to any Cas12c1, Cas12c2, or OspCas12c protein described herein. It should be appreciated that Cas12c1, Cas12c2, or OspCas12c from other bacterial species may also be used in accordance with the present disclosure.

Cas12c1
MQTKKTHLHLISAKASRKYRRTIACLSDTAKKDLERRKQSGAADPAQELS
CLKTIKFKLEVPEGSKLPSFDRISQIYNALETIEKGSLSYLLFALILSGF
RIFPNSSAAKTFASSSCYKNDQFASQIKEIFGEMVKNFIPSELESILKKG
RRKNNKDWTEENIKRVLNSEFGRKNSEGSSALFDSFLSKFSQELFRKFDS
WNEVNKKYLEAAELLDSMLASYGPFDSVCKMIGDSDSRNSLPDKSTIAFT
NNAEITVDIESSVMPYMAIAALLREYRQSKSKAAPVAYVQSHLTTTNGNG
LSWFFKFGLDLIRKAPVSSKQSTSDGSKSLQELFSVPDDKLDGLKFIKEA
CEALPEASLLCGEKGELLGYQDFRTSFAGHIDSWVANYVNRLFELIELVN
QLPESIKLPSILTQKNHNLVASLGLQEAEVSHSLELFEGLVKNVRQTLKK
LAGIDISSSPNEQDIKEFYAFSDVLNRLGSIRNQIENAVQTAKKDKIDLE
SAIEWKEWKKLKKLPKLNGLGGGVPKQQELLDKALESVKQIRHYQRIDFE
RVIQWAVNEHCLETVPKFLVDAEKKKINKESSTDFAAKENAVRFLLEGIG
AAARGKTDSVSKAAYNWEVVNNFLAKKDLNRYFINCQGCIYKPPYSKRRS
LAFALRSDNKDTIEVVWEKFETFYKEISKEIEKFNIFSQEFQTFLHLENL
RMKLLLRRIQKPIPAEIAFFSLPQEYYDSLPPNVAFLALNQEITPSEYIT
QFNLYSSFLNGNLILLRRSRSYLRAKFSWVGNSKLIYAAKEARLWKIPNA
YWKSDEWKMILDSNVLVFDKAGNVLPAPTLKKVCEREGDLRLFYPLLRQL
PHDWCYRNPFVKSVGREKNVIEVNKEGEPKVASALPGSLFRLIGPAPFKS
LLDDCFFNPLDKDLRECMLIVDQEISQKVEAQKVEASLESCTYSIAVPIR
YHLEEPKVSNQFENVLAIDQGEAGLAYAVFSLKSIGEAETKPIAVGTIRI
PSIRRLIHSVSTYRKKKQRLQNFKQNYDSTAFIMRENVTGDVCAKIVGLM
KEFNAFPVLEYDVKNLESGSRQLSAVYKAVNSHFLYFKEPGRDALRKQLW
YGGDSWTIDGIEIVTRERKEDGKEGVEKIVPLKVFPGRSVSARFTSKTCS
CCGRNVFDWLFTEKKAKTNKKFNVNSKGELTTADGVIQLFEADRSKGPKF
YARRKERTPLTKPIAKGSYSLEEIERRVRTNLRRAPKSKQSRDTSQSQYF
CVYKDCALHFSGMQADENAAINIGRRFLTALRKNRRSDFPSNVKISDRLL
DN
Cas12c2
MTKHSIPLHAFRNSGADARKWKGRIALLAKRGKETMRTLQFPLEMSEPEA
AAINTTPFAVAYNAIEGTGKGTLFDYWAKLHLAGFRFFPSGGAATIFRQQ
AVFEDASWNAAFCQQSGKDWPWLVPSKLYERFTKAPREVAKKDGSKKSIE
FTQENVANESHVSLVGASITDKTPEDQKEFFLKMAGALAEKFDSWKSANE
DRIVAMKVIDEFLKSEGLHLPSLENIAVKCSVETKPDNATVAWHDAPMSG
VQNLAIGVFATCASRIDNIYDLNGGKLSKLIQESATTPNVTALSWLFGKG
LEYFRTTDIDTIMQDFNIPASAKESIKPLVESAQAIPTMTVLGKKNYAPF
RPNFGGKIDSWIANYASRLMLLNDILEQIEPGFELPQALLDNETLMSGID
MTGDELKELIEAVYAWVDAAKQGLATLLGRGGNVDDAVQTFEQFSAMMDT
LNGTLNTISARYVRAVEMAGKDEARLEKLIECKFDIPKWCKSVPKLVGIS
GGLPKVEEEIKVMNAAFKDVRARMFVRFEEIAAYVASKGAGMDVYDALEK
RELEQIKKLKSAVPERAHIQAYRAVLHRIGRAVQNCSEKTKQLFSSKVIE
MGVFKNPSHLNNFIFNQKGAIYRSPFDRSRHAPYQLHADKLLKNDWLELL
AEISATLMASESTEQMEDALRLERTRLQLQLSGLPDWEYPASLAKPDIEV
EIQTALKMQLAKDTVTSDVLQRAFNLYSSVLSGLTFKLLRRSFSLKMRFS
VADTTQLIYVPKVCDWAIPKQYLQAEGEIGIAARVVTESSPAKMVTEVEM
KEPKALGHFMQQAPHDWYFDASLGGTQVAGRIVEKGKEVGKERKLVGYRM
RGNSAYKTVLDKSLVGNTELSQCSMIIEIPYTQTVDADFRAQVQAGLPKV
SINLPVKETITASNKDEQMLFDRFVAIDLGERGLGYAVFDAKTLELQESG
HRPIKAITNLLNRTHHYEQRPNQRQKFQAKFNVNLSELRENTVGDVCHQI
NRICAYYNAFPVLEYMVPDRLDKQLKSVYESVTNRYIWSSTDAHKSARVQ
FWLGGETWEHPYLKSAKDKKPLVLSPGRGASGKGTSQTCSCCGRNPFDLI
KDMKPRAKIAVVDGKAKLENSELKLFERNLESKDDMLARRHRNERAGMEQ
PLTPGNYTVDEIKALLRANLRRAPKNRRTKDTTVSEYHCVFSDCGKTMHA
DENAAVNIGGKFIADIEK
OspCasl2c
MTKLRHRQKKLTHDWAGSKKREVLGSNGKLQNPLLMPVKKGQVTEFRKAF
SAYARATKGEMTDGRKNMFTHSFEPFKTKPSLHQCELADKAYQSLHSYLP
GSLAHFLLSAHALGFRIFSKSGEATAFQASSKIEAYESKLASELACVDLS
IQNLTISTLFNALTTSVRGKGEETSADPLIARFYTLLTGKPLSRDTQGPE
RDLAEVISRKIASSFGTWKEMTANPLQSLQFFEEELHALDANVSLSPAFD
VLIKMNDLQGDLKNRTIVFDPDAPVFEYNAEDPADIIIKLTARYAKEAVI
KNQNVGNYVKNAITTTNANGLGWLLNKGLSLLPVSTDDELLEFIGVERSH
PSCHALIELIAQLEAPELFEKNVFSDTRSEVQGMIDSAVSNHIARLSSSR
NSLSMDSEELERLIKSFQIHTPHCSLFIGAQSLSQQLESLPEALQSGVNS
ADILLGSTQYMLTNSLVEESIATYQRTLNRINYLSGVAGQINGAIKRKAI
DGEKIHLPAAWSELISLPFIGQPVIDVESDLAHLKNQYQTLSNEFDTLIS
ALQKNFDLNFNKALLNRTQHFEAMCRSTKKNALSKPEIVSYRDLLARLTS
CLYRGSLVLRRAGIEVLKKHKIFESNSELREHVHERKHFVFVSPLDRKAK
KLLRLTDSRPDLLHVIDEILQHDNLENKDRESLWLVRSGYLLAGLPDQLS
SSFINLPIITQKGDRRLIDLIQYDQINRDAFVMLVTSAFKSNLSGLQYRA
NKQSFVVTRTLSPYLGSKLVYVPKDKDWLVPSQMFEGRFADILQSDYMVW
KDAGRLCVIDTAKHLSNIKKSVFSSEEVLAFLRELPHRTFIQTEVRGLGV
NVDGIAFNNGDIPSLKTFSNCVQVKVSRTNTSLVQTLNRWFEGGKVSPPS
IQFERAYYKKDDQIHEDAAKRKIRFQMPATELVHASDDAGWTPSYLLGID
PGEYGMGLSLVSINNGEVLDSGFIHINSLINFASKKSNHQTKVVPRQQYK
SPYANYLEQSKDSAAGDIAHILDRLIYKLNALPVFEALSGNSQSAADQVW
TKVLSFYTWGDNDAQNSIRKQHWFGASHWDIKGMLRQPPTEKKPKPYIAF
PGSQVSSYGNSQRCSCCGRNPIEQLREMAKDTSIKELKIRNSEIQLFDGT
IKLFNPDPSTVIERRRHNLGPSRIPVADRTFKNISPSSLEFKELITIVSR
SIRHSPEFIAKKRGIGSEYFCAYSDCNSSLNSEANAAANVAQKFQKQLFE
EL

[0260] In some embodiments, a napDNAbp refers to Cas12g, Cas12h, or Cas12i, which have been described in, for example, Yan et al., “Functionally Diverse Type V CRISPR-Cas Systems,” Science, 2019 Jan. 4; 363: 88-91; the entire contents of each is hereby incorporated by reference. By aggregating more than 10 terabytes of sequence data, new classifications of Type V Cas proteins were identified that showed weak similarity to previously characterized Class V protein, including Cas12g, Cas12h, and Cas12i. In some embodiments, the Cas12 protein is a Cas12g or a variant of Cas12g. In some embodiments, the Cas12 protein is a Cas12h or a variant of Cas12h. In some embodiments, the Cas12 protein is a Cas12i or a variant of Cas12i. It should be appreciated that other RNA-guided DNA binding proteins may be used as a napDNAbp, and are within the scope of this disclosure. In some embodiments, the napDNAbp comprises an amino acid sequence that is at least 85%, at least 90%, at least 91%, at least 92%, at least 93%, at least 94%, at least 95%, at least 96%, at least 97%, at least 98%, at least 99%, or at least 99.5% identical to a naturally-occurring Cas12g, Cas12h, or Cas12i protein. In some embodiments, the napDNAbp is a naturally-occurring Cas12g, Cas12h, or Cas12i protein. In some embodiments, the napDNAbp comprises an amino acid sequence that is at least 85%, at least 90%, at least 91%, at least 92%, at least 93%, at least 94%, at least 95%, at least 96%, at least 97%, at least 98%, at least 99%, or at ease 99.5% identical to any Cas12g, Cas12h, or Cas12i protein described herein. It should be appreciated that Cas12g, Cas12h, or Cas12i from other bacterial species may also be used in accordance with the present disclosure. In some embodiments, the Cas12i is a Cas12i1 or a Cas12i2.

Cas12g1
MAQASSTPAVSPRPRPRYREERTLVRKLLPRPGQSKQEFRENVKKLRKA
FLQFNADVSGVCQWAIQFRPRYGKPAEPTETFWKFFLEPETSLPPNDSR
SPEFRRLQAFEAAAGINGAAALDDPAFTNELRDSILAVASRPKTKEAQR
LFSRLKDYQPAHRMILAKVAAEWIESRYRRAHQNWERNYEEWKKEKQEW
EQNHPELTPEIREAFNQIFQQLEVKEKRVRICPAARLLQNKDNCQYAGK
NKHSVLCNQFNEFKKNHLQGKAIKFFYKDAEKYLRCGLQSLKPNVQGPF
REDWNKYLRYMNLKEETLRGKNGGRLPHCKNLGQECEFNPHTALCKQYQ
QQLSSRPDLVQHDELYRKWRREYWREPRKPVFRYPSVKRHSIAKIEGEN
YFQADFKNSVVGLRLDSMPAGQYLEFAFAPWPRNYRPQPGETEISSVHL
HFVGTRPRIGFRFRVPHKRSRFDCTQEELDELRSRTFPRKAQDQKFLEA
ARKRLLETFPGNAEQELRLLAVDLGTDSARAAFFIGKTFQQAFPLKIVK
IEKLYEQWPNQKQAGDRRDASSKQPRPGLSRDHVGRHLQKMRAQASEIA
QKRQELTGTPAPETTTDQAAKKATLQPFDLRGLTVHTARMIRDWARLNA
RQIIQLAEENQVDLIVLESLRGFRPPGYENLDQEKKRRVAFFAHGRIRR
KVTEKAVERGMRVVTVPYLASSKVCAECRKKQKDNKQWEKNKKRGLFKC
EGCGSQAQVDENAARVLGRVFWGEIELPTAIP
Cas12h1
MKVHEIPRSQLLKIKQYEGSFVEWYRDLQEDRKKFASLLFRWAAFGYAA
REDDGATYISPSQALLERRLLLGDAEDVAIKFLDVLFKGGAPSSSCYSL
FYEDFALRDKAKYSGAKREFIEGLATMPLDKIIERIRQDEQLSKIPAEE
WLILGAEYSPEEIWEQVAPRIVNVDRSLGKQLRERLGIKCRRPHDAGYC
KILMEVVARQLRSHNETYHEYLNQTHEMKTKVANNLTNEFDLVCEFAEV
LEEKNYGLGWYVLWQGVKQALKEQKKPTKIQIAVDQLRQPKFAGLLTAK
WRALKGAYDTWKLKKRLEKRKAFPYMPNWDNDYQIPVGLTGLGVFTLEV
KRTEVVVDLKEHGKLFCSHSHYFGDLTAEKHPSRYHLKFRHKLKLRKRD
SRVEPTIGPWIEAALREITIQKKPNGVFYLGLPYALSHGIDNFQIAKRF
FSAAKPDKEVINGLPSEMVVGAADLNLSNIVAPVKARIGKGLEGPLHAL
DYGYGELIDGPKILTPDGPRCGELISLKRDIVEIKSAIKEFKACQREGL
TMSEETTTWLSEVESPSDSPRCMIQSRIADTSRRLNSFKYQMNKEGYQD
LAEALRLLDAMDSYNSLLESYQRMHLSPGEQSPKEAKFDTKRASFRDLL
RRRVAHTIVEYFDDCDIVFFEDLDGPSDSDSRNNALVKLLSPRTLLLYI
RQALEKRGIGMVEVAKDGTSQNNPISGHVGWRNKQNKSEIYFYEDKELL
VMDADEVGAMNILCRGLNHSVCPYSFVTKAPEKKNDEKKEGDYGKRVKR
FLKDRYGSSNVRFLVASMGFVTVTTKRPKDALVGKRLYYHGGELVTHDL
HNRMKDEIKYLVEKEVLARRVSLSDSTIKSYKSFAHV
Cas12i1
MSNKEKNASETRKAYTTKMIPRSHDRMKLLGNEMDYLMDGTPIFFELWN
QFGGGIDRDIISGTANKDKISDDLLLAVNWFKVMPINSKPQGVSPSNLA
NLFQQYSGSEPDIQAQEYFASNFDTEKHQWKDMRVEYERLLAELQLSRS
DMHHDLKLMYKEKCIGLSLSTAHYITSVMFGTGAKNNRQTKHQFYSKVI
QLLEESTQINSVEQLASIILKAGDCDSYRKLRIRCSRKGATPSILKIVQ
DYELGTNHDDEVNVPSLIANLKEKLGRFEYECEWKCMEKIKAFLASKVG
PYYLGSYSAMLENALSPIKGMTTKNCKFVLKQIDAKNDIKYENEPFGKI
VEGFFDSPYFESDTNVKWVLHPHHIGESNIKTLWEDLNAIHSKYEEDIA
SLSEDKKEKRIKVYQGDVCQTINTYCEEVGKEAKTPLVQLLRYLYSRKD
DIAVDKIIDGITFLSKKHKVEKQKINPVIQKYPSFNFGNNSKLLGKIIS
PKDKLKHNLKCNRNQVDNYIWIEIKVLNTKTMRWEKHHYALSSTRFLEE
VYYPATSENPPDALAARFRTKTNGYEGKPALSAEQIEQIRSAPVGLRKV
KKRQMRLEAARQQNLLPRYTWGKDFNINICKRGNNFEVTLATKVKKKKE
KNYKVVLGYDANIVRKNTYAAIEAHANGDGVIDYNDLPVKPIESGFVTV
ESQVRDKSYDQLSYNGVKLLYCKPHVESRRSFLEKYRNGTMKDNRGNNI
QIDFMKDFEAIADDETSLYYFNMKYCKLLQSSIRNHSSQAKEYREEIFE
LLRDGKLSVLKLSSLSNLSFVMFKVAKSLIGTYFGHLLKKPKNSKSDVK
APPITDEDKQKADPEMFALRLALEEKRLNKVKSKKEVIANKIVAKALEL
RDKYGPVLIKGENISDTTKKGKKSSTNSFLMDWLARGVANKVKEMVMMH
QGLEFVEVNPNFTSHQDPFVHKNPENTFRARYSRCTPSELTEKNRKEIL
SFLSDKPSKRPTNAYYNEGAMAFLATYGLKKNDVLGVSLEKFKQIMANI
LHQRSEDQLLFPSRGGMFYLATYKLDADATSVNWNGKQFWVCNADLVAA
YNVGLVDIQKDFKKK
Cas12i2
MSSAIKSYKSVLRPNERKNQLLKSTIQCLEDGSAFFFKMLQGLFGGITP
EIVRFSTEQEKQQQDIALWCAVNWFRPVSQDSLTHTIASDNLVEKFEEY
YGGTASDAIKQYFSASIGESYYWNDCRQQYYDLCRELGVEVSDLTHDLE
ILCREKCLAVATESNQNNSIISVLFGTGEKEDRSVKLRITKKILEAISN
LKEIPKNVAPIQEIILNVAKATKETFRQVYAGNLGAPSTLEKFIAKDGQ
KEFDLKKLQTDLKKVIRGKSKERDWCCQEELRSYVEQNTIQYDLWAWGE
MFNKAHTALKIKSTRNYNFAKQRLEQFKEIQSLNNLLVVKKLNDFFDSE
FFSGEETYTICVHHLGGKDLSKLYKAWEDDPADPENAIVVLCDDLKNNF
KKEPIRNILRYIFTIRQECSAQDILAAAKYNQQLDRYKSQKANPSVLGN
QGFTWTNAVILPEKAQRNDRPNSLDLRIWLYLKLRHPDGRWKKHHIPFY
DTRFFQEIYAAGNSPVDTCQFRTPRFGYHLPKLTDQTAIRVNKKHVKAA
KTEARIRLAIQQGTLPVSNLKITEISATINSKGQVRIPVKFDVGRQKGT
LQIGDRFCGYDQNQTASHAYSLWEVVKEGQYHKELGCFVRFISSGDIVS
ITENRGNQFDQLSYEGLAYPQYADWRKKASKFVSLWQITKKNKKKEIVT
VEAKEKFDAICKYQPRLYKFNKEYAYLLRDIVRGKSLVELQQIRQEIFR
FIEQDCGVTRLGSLSLSTLETVKAVKGIIYSYFSTALNASKNNPISDEQ
RKEFDPELFALLEKLELIRTRKKKQKVERIANSLIQTCLENNIKFIRGE
GDLSTTNNATKKKANSRSMDWLARGVFNKIRQLAPMHNITLFGCGSLYT
SHQDPLVHRNPDKAMKCRWAAIPVKDIGDWVLRKLSQNLRAKNIGTGEY
YHQGVKEFLSHYELQDLEEELLKWRSDRKSNIPCWVLQNRLAEKLGNKE
AVVYIPVRGGRIYFATHKVATGAVSIVFDQKQVWVCNADHVAAANIALT
VKGIGEQSSDEENPDGSRIKLQLTS

[0261] Representative nucleic acid and protein sequences of the base editors follow:

BhCasl2b GGSGGS-ABE8-Xten20 at P153 [symbol]
GCCACCAG
ATCCTTCATCCTGAAGATCGAGCCCAACGAGGAAGTGAAGAAAGGCCTCTGGAAAACCCACGAGG
TGCTGAACCACGGAATCGCCTACTACATGAATATCCTGAAGCTGATCCGGCAAGAGGCCATCTAC
GAGCACCACGAGCAGGACCCCAAGAATCCCAAGAAGGTGTCCAAGGCCGAGATCCAGGCCGAGCT
GTGGGATTTCGTGCTGAAGATGCAGAAGTGCAACAGCTTCACACACGAGGTGGACAAGGACGAGG
TGTTCAACATCCTGAGAGAGCTGTACGAGGAACTGGTGCCCAGCAGCGTGGAAAAGAAGGGCGAA
GCCAACCAGCTGAGCAACAAGTTTCTGTACCCTCTGGTGGACCCCAACAGCCAGTCTGGAAAGGG
AACAGCCAGCAGCGGCAGAAAGCCCAGATGGTACAACCTGAAGATTGCCGGCGATCCCggaggct

[chemical structure]

[chemical structure]

[chemical structure]

[chemical structure]

[chemical structure]

[chemical structure]

[chemical structure]

[chemical structure]

ATCTGAAACACCTGGCACAAGCGAGAGCGCCACCCCTGAGAGCTCTGGCTCCTGGGAAGAAGAGA
AGAAGAAGTGGGAAGAAGATAAGAAAAAGGACCCGCTGGCCAAGATCCTGGGCAAGCTGGCTGAG
TACGGAGTGATCCCTCTGTTCATCCCCTACACCGAGAGCAACGAGCCCATCGTGAAAGAAATCAA
GTGGATGGAAAAGTCCCGGAACCAGAGCGTGCGGCGGCTGGATAAGGACATGTTCATTCAGGCCC
TGGAACGGTTCCTGAGCTGGGAGAGCTGGAACCTGAAAGTGAAAGAGGAATACGAGAAGGTCGAG
AAAGAGTACAAGACCCTGGAAGAGAGGATCAAAGAGGACATCCAGGCTCTGAAGGCTCTGGAACA
GTATGAGAAAGAGCGGCAAGAACAGCTGCTGCGGGACACCCTGAACACCAACGAGTACCGGCTGA
GCAAGAGAGGCCTTAGAGGCTGGCGGGAAATCATCCAGAAATGGCTGAAAATGGACGAGAACGAG
CCCTCCGAGAAGTACCTGGAAGTGTTCAAGGACTACCAGCGGAAGCACCCTAGAGAGGCCGGCGA
TTACAGCGTGTACGAGTTCCTGTCCAAGAAAGAGAACCACTTCATCTGGCGGAATCACCCTGAGT
ACCCCTACCTGTACGCCACCTTCTGCGAGATCGACAAGAAAAAGAAGGACGCCAAGCAGCAGGCC
ACCTTCACACTGGCCGATCCTATCAATCACCCTCTGTGGGTCCGATTCGAGGAAAGAAGCGGCAG
CAACCTGAACAAGTACAGAATCCTGACCGAGCAGCTGCACACCGAGAAGCTGAAGAAAAAGCTGA
CAGTGCAGCTGGACCGGCTGATCTACCCTACAGAATCTGGCGGCTGGGAAGAGAAGGGCAAAGTG
GACATTGTGCTGCTGCCCAGCCGGCAGTTCTACAACCAGATCTTCCTGGACATCGAGGAAAAGGG
CAAGCACGCCTTCACCTACAAGGATGAGAGCATCAAGTTCCCTCTGAAGGGCACACTCGGCGGAG
CCAGAGTGCAGTTCGACAGAGATCACCTGAGAAGATACCCTCACAAGGTGGAAAGCGGCAACGTG
GGCAGAATCTACTTCAACATGACCGTGAACATCGAGCCTACAGAGTCCCCAGTGTCCAAGTCTCT
GAAGATCCACCGGGACGACTTCCCCAAGGTGGTCAACTTCAAGCCCAAAGAACTGACCGAGTGGA
TCAAGGACAGCAAGGGCAAGAAACTGAAGTCCGGCATCGAGTCCCTGGAAATCGGCCTGAGAGTG
ATGAGCATCGACCTGGGACAGAGACAGGCCGCTGCCGCCTCTATTTTCGAGGTGGTGGATCAGAA
GCCCGACATCGAAGGCAAGCTGTTTTTCCCAATCAAGGGCACCGAGCTGTATGCCGTGCACAGAG
CCAGCTTCAACATCAAGCTGCCCGGCGAGACACTGGTCAAGAGCAGAGAAGTGCTGCGGAAGGCC
AGAGAGGACAATCTGAAACTGATGAACCAGAAGCTCAACTTCCTGCGGAACGTGCTGCACTTCCA
GCAGTTCGAGGACATCACCGAGAGAGAGAAGCGGGTCACCAAGTGGATCAGCAGACAAGAGAACA
GCGACGTGCCCCTGGTGTACCAGGATGAGCTGATCCAGATCCGCGAGCTGATGTACAAGCCTTAC
AAGGACTGGGTCGCCTTCCTGAAGCAGCTCCACAAGAGACTGGAAGTCGAGATCGGCAAAGAAGT
GAAGCACTGGCGGAAGTCCCTGAGCGACGGAAGAAAGGGCCTGTACGGCATCTCCCTGAAGAACA
TCGACGAGATCGATCGGACCCGGAAGTTCCTGCTGAGATGGTCCCTGAGGCCTACCGAACCTGGC
GAAGTGCGTAGACTGGAACCCGGCCAGAGATTCGCCATCGACCAGCTGAATCACCTGAACGCCCT
GAAAGAAGATCGGCTGAAGAAGATGGCCAACACCATCATCATGCACGCCCTGGGCTACTGCTACG
ACGTGCGGAAGAAGAAATGGCAGGCTAAGAACCCCGCCTGCCAGATCATCCTGTTCGAGGATCTG
AGCAACTACAACCCCTACGAGGAAAGGTCCCGCTTCGAGAACAGCAAGCTCATGAAGTGGTCCAG
ACGCGAGATCCCCAGACAGGTTGCACTGCAGGGCGAGATCTATGGCCTGCAAGTGGGAGAAGTGG
GCGCTCAGTTCAGCAGCAGATTCCACGCCAAGACAGGCAGCCCTGGCATCAGATGTAGCGTCGTG
ACCAAAGAGAAGCTGCAGGACAATCGGTTCTTCAAGAATCTGCAGAGAGAGGGCAGACTGACCCT
GGACAAAATCGCCGTGCTGAAAGAGGGCGATCTGTACCCAGACAAAGGCGGCGAGAAGTTCATCA
GCCTGAGCAAGGATCGGAAGTGCGTGACCACACACGCCGACATCAACGCCGCTCAGAACCTGCAG
AAGCGGTTCTGGACAAGAACCCACGGCTTCTACAAGGTGTACTGCAAGGCCTACCAGGTGGACG
GCCAGACCGTGTACATCCCTGAGAGCAAGGACCAGAAGCAGAAGATCATCGAAGAGTTCGGC
GAGGGCTACTTCATTCTGAAGGACGGGGTGTACGAATGGGTCAACGCCGGCAAGCTGAAAATCAA
GAAGGGCAGCTCCAAGCAGAGCAGCAGCGAGCTGGTGGATAGCGACATCCTGAAAGACAGCTTCG
ACCTGGCCTCCGAGCTGAAAGGCGAAAAGCTGATGCTGTACAGGGACCCCAGCGGCAATGTGTTC
CCCAGCGACAAATGGATGGCCGCTGGCGTGTTCTTCGGAAAGCTGGAACGCATCCTGATCAGCAA
GCTGACCAACCAGTACTCCATCAGCACCATCGAGGACGACAGCAGCAAGCAGTCTATGAAAAGGC
CGGCGGCCACGAAAAAGGCCGGCCAGGCAAAAAAGAAAAAG [symbol] TACCCATACGATGTTCCA
GATTACGCTTATCCCTACGACGTGCCTGATTATGCATACCCATATGATGTCCCCGACTATGCCTA
A
MAPKKKRKVGIHGVPAAATRSFILKIEPNEEVKKGLWKTHEVLNHGIAYYMNILKLIRQEAIYEH
HEQDPKNPKKVSKAEIQAELWDFVLKMQKCNSFTHEVDKDEVFNILRELYEELVPSSVEKKGEAN
QLSNKFLYPLVDPNSQSGKGTASSGRKPRWYNLKIAGDPGGSGGSSEVEFSHEYWMRHALTLAKR
ARDEREVPVGAVLVLNNRVIGEGWNRAIGLHDPTAHAEIMALRQGGLVMQNYRLYDATLYVTFEP
CVMCAGAMIHSRIGRVVFGVRNAKTGAAGSLMDVLHHPGMNHRVEITEGILADEGAALLCRFFRM
PRRVFNAQKKAQSSTDGSSGSETPGTSESATPESSGSWEEEKKKWEEDKKKDPLAKILGKLAEYG
LIPLFIPYTDSNEPIVKEIKWMEKSRNQSVRRLDKDMFIQALERFLSWESWNLKVKEEYEKVEKE
YKTLEERIKEDIQALKALEQYEKERQEQLLRDTLNTNEYRLSKRGLRGWREIIQKWLKMDENEPS
EKYLEVFKDYQRKHPREAGDYSVYEFLSKKENHFIWRNHPEYPYLYATFCEIDKKKKDAKQQATF
TLADPINHPLWVRFEERSGSNLNKYRILTEQLHTEKLKKKLTVQLDRLIYPTESGGWEEKGKVDI
VLLPSRQFYNQIFLDIEEKGKHAFTYKDESIKFPLKGTLGGARVQFDRDHLRRYPHKVESGNVGR
IYFNMTVNIEPTESPVSKSLKIHRDDFPKVVNFKPKELTEWIKDSKGKKLKSGIESLEIGLRVMS
IDLGQRQAAAASIFEVVDQKPDIEGKLFFPIKGTELYAVHRASFNIKLPGETLVKSREVLRKARE
DNLKLMNQKLNFLRNVLHFQQFEDITEREKRVTKWISRQENSDVPLVYQDELIQIRELMYKPYKD
WVAFLKQLHKRLEVEIGKEVKHWRKSLSDGRKGLYGISLKNIDEIDRTRKFLLRWSLRPTEPGEV
RRLEPGQRFAIDQLNHLNALKEDRLKKMANTIIMHALGYCYDVRKKKWQAKNPACQIILFEDLSN
YNPYEERSRFENSKLMKWSRREIPRQVALQGEIYGLQVGEVGAQFSSRFHAKTGSPGIRCSVVTK
EKLQDNRFFKNLQREGRLTLDKIAVLKEGDLYPDKGGEKFISLSKDRKCVTTHADINAAQNLQKR
FWTRTHGFYKVYCKAYQVDGQTVYIPESKDQKQKIIEEFGEGYFILKDGVYEWVNAGKLKIKKGS
SKQSSSELVDSDILKDSFDLASELKGEKLMLYRDPSGNVFPSDKWMAAGVFFGKLERILISKLTN
QYSISTIEDDSSKQSMKRPAATKKAGQAKKKKGSYPYDVPDYAYPYDVPDYAYPYDVPDYA
BhCasl2b GGSGGS-ABE8-Xten20 at K255
GCCACC [symbol] GCCACCAG
ATCCTTCATCCTGAAGATCGAGCCCAACGAGGAAGTGAAGAAAGGCCTCTGGAAAACCCACGAGG
TGCTGAACCACGGAATCGCCTACTACATGAATATCCTGAAGCTGATCCGGCAAGAGGCCATCTAC
GAGCACCACGAGCAGGACCCCAAGAATCCCAAGAAGGTGTCCAAGGCCGAGATCCAGGCCGAGCT
GTGGGATTTCGTGCTGAAGATGCAGAAGTGCAACAGCTTCACACACGAGGTGGACAAGGACGAGG
TGTTCAACATCCTGAGAGAGCTGTACGAGGAACTGGTGCCCAGCAGCGTGGAAAAGAAGGGCGAA
GCCAACCAGCTGAGCAACAAGTTTCTGTACCCTCTGGTGGACCCCAACAGCCAGTCTGGAAAGGG
AACAGCCAGCAGCGGCAGAAAGCCCAGATGGTACAACCTGAAGATTGCCGGCGATCCCTCCTGGG
AAGAAGAGAAGAAGAAGTGGGAAGAAGATAAGAAAAAGGACCCGCTGGCCAAGATCCTGGGCAAG
CTGGCTGAGTACGGACTGATCCCTCTGTTCATCCCCTACACCGACAGCAACGAGCCCATCGTGAA
AGAAATCAAGTGGATGGAAAAGTCCCGGAACCAGAGCGTGCGGCGGCTGGATAAGGACATGTTCA
TTCAGGCCCTGGAACGGTTCCTGAGCTGGGAGAGCTGGAACCTGAAAGTGAAAGAGGAATACGAG

[chemical structure]

[chemical structure]

[chemical structure]

[chemical structure]

[chemical structure]

[chemical structure]

[chemical structure]

[chemical structure]

[chemical structure]

ACAAGCGAGAGCGCCACCCCTGAGAGCTCTGGCGAGGACATCCAGGCTCTGAAGGCTCTGGAACA
GTATGAGAAAGAGCGGCAAGAACAGCTGCTGCGGGACACCCTGAACACCAACGAGTACCGGCTGA
GCAAGAGAGGCCTTAGAGGCTGGCGGGAAATCATCCAGAAATGGCTGAAAATGGACGAGAACGAG
CCCTCCGAGAAGTACCTGGAAGTGTTCAAGGACTACCAGCGGAAGCACCCTAGAGAGGCCGGCGA
TTACAGCGTGTACGAGTTCCTGTCCAAGAAAGAGAACCACTTCATCTGGCGGAATCACCCTGAGT
ACCCCTACCTGTACGCCACCTTCTGCGAGATCGACAAGAAAAAGAAGGACGCCAAGCAGCAGGCC
ACCTTCACACTGGCCGATCCTATCAATCACCCTCTGTGGGTCCGATTCGAGGAAAGAAGCGGCAG
CAACCTGAACAAGTACAGAATCCTGACCGAGCAGCTGCACACCGAGAAGCTGAAGAAAAAGCTGA
CAGTGCAGCTGGACCGGCTGATCTACCCTACAGAATCTGGCGGCTGGGAAGAGAAGGGCAAAGTG
GACATTGTGCTGCTGCCCAGCCGGCAGTTCTACAACCAGATCTTCCTGGACATCGAGGAAAAGGG
CAAGCACGCCTTCACCTACAAGGATGAGAGCATCAAGTTCCCTCTGAAGGGCACACTCGGCGGAG
CCAGAGTGCAGTTCGACAGAGATCACCTGAGAAGATACCCTCACAAGGTGGAAAGCGGCAACGTG
GGCAGAATCTACTTCAACATGACCGTGAACATCGAGCCTACAGAGTCCCCAGTGTCCAAGTCTCT
GAAGATCCACCGGGACGACTTCCCCAAGGTGGTCAACTTCAAGCCCAAAGAACTGACCGAGTGGA
TCAAGGACAGCAAGGGCAAGAAACTGAAGTCCGGCATCGAGTCCCTGGAAATCGGCCTGAGAGTG
ATGAGCATCGACCTGGGACAGAGACAGGCCGCTGCCGCCTCTATTTTCGAGGTGGTGGATCAGAA
GCCCGACATCGAAGGCAAGCTGTTTTTCCCAATCAAGGGCACCGAGCTGTATGCCGTGCACAGAG
CCAGCTTCAACATCAAGCTGCCCGGCGAGACACTGGTCAAGAGCAGAGAAGTGCTGCGGAAGGCC
AGAGAGGACAATCTGAAACTGATGAACCAGAAGCTCAACTTCCTGCGGAACGTGCTGCACTTCCA
GCAGTTCGAGGACATCACCGAGAGAGAGAAGCGGGTCACCAAGTGGATCAGCAGACAAGAGAACA
GCGACGTGCCCCTGGTGTACCAGGATGAGCTGATCCAGATCCGCGAGCTGATGTACAAGCCTTAC
AAGGACTGGGTCGCCTTCCTGAAGCAGCTCCACAAGAGACTGGAAGTCGAGATCGGCAAAGAAGT
GAAGCACTGGCGGAAGTCCCTGAGCGACGGAAGAAAGGGCCTGTACGGCATCTCCCTGAAGAACA
TCGACGAGATCGATCGGACCCGGAAGTTCCTGCTGAGATGGTCCCTGAGGCCTACCGAACCTGGC
GAAGTGCGTAGACTGGAACCCGGCCAGAGATTCGCCATCGACCAGCTGAATCACCTGAACGCCCT
GAAAGAAGATCGGCTGAAGAAGATGGCCAACACCATCATCATGCACGCCCTGGGCTACTGCTACG
ACGTGCGGAAGAAGAAATGGCAGGCTAAGAACCCCGCCTGCCAGATCATCCTGTTCGAGGATCTG
AGCAACTACAACCCCTACGAGGAAAGGTCCCGCTTCGAGAACAGCAAGCTCATGAAGTGGTCCAG
ACGCGAGATCCCCAGACAGGTTGCACTGCAGGGCGAGATCTATGGCCTGCAAGTGGGAGAAGTGG
GCGCTCAGTTCAGCAGCAGATTCCACGCCAAGACAGGCAGCCCTGGCATCAGATGTAGCGTCGTG
ACCAAAGAGAAGCTGCAGGACAATCGGTTCTTCAAGAATCTGCAGAGAGAGGGCAGACTGACCCT
GGACAAAATCGCCGTGCTGAAAGAGGGCGATCTGTACCCAGACAAAGGCGGCGAGAAGTTCATCA
GCCTGAGCAAGGATCGGAAGTGCGTGACCACACACGCCGACATCAACGCCGCTCAGAACCTGCAG
AAGCGGTTCTGGACAAGAACCCACGGCTTCTACAAGGTGTACTGCAAGGCCTACCAGGTGGACGG
CCAGACCGTGTACATCCCTGAGAGCAAGGACCAGAAGCAGAAGATCATCGAAGAGTTCGGCGAGG
GCTACTTCATTCTGAAGGACGGGGTGTACGAATGGGTCAACGCCGGCAAGCTGAAAATCAAGAAG
GGCAGCTCCAAGCAGAGCAGCAGCGAGCTGGTGGATAGCGACATCCTGAAAGACAGCTTCGACCT
GGCCTCCGAGCTGAAAGGCGAAAAGCTGATGCTGTACAGGGACCCCAGCGGCAATGTGTTCCCCA
GCGACAAATGGATGGCCGCTGGCGTGTTCTTCGGAAAGCTGGAACGCATCCTGATCAGCAAGCTG
ACCAACCAGTACTCCATCAGCACCATCGAGGACGACAGCAGCAAGCAGTCTATGAAAAGGCCGGC
GGCCACGAAAAAGGCCGGCCAGGCAAAAAAGAAAAAG [symbol] TACCCATACGATGTTCCAGATT
ACGCTTATCCCTACGACGTGCCTGATTATGCATACCCATATGATGTCCCCGACTATGCCTAA
MAPKKKRKVGIHGVPAAATRSFILKIEPNEEVKKGLWKTHEVLNHGIAYYMNILKLIRQEAIYEH
HEQDPKNPKKVSKAEIQAELWDFVLKMQKCNSFTHEVDKDEVFNILRELYEELVPSSVEKKGEAN
QLSNKFLYPLVDPNSQSGKGTASSGRKPRWYNLKIAGDPSWEEEKKKWEEDKKKDPLAKILGKLA
EYGLIPLFIPYTDSNEPIVKEIKWMEKSRNQSVRRLDKDMFIQALERFLSWESWNLKVKEEYEKV
EKEYKTLEERIKGGSGGSSEVEFSHEYWMRHALTLAKRARDEREVPVGAVLVLNNRVIGEGWNRA
IGLHDPTAHAEIMALRQGGLVMQNYRLYDATLYVTFEPCVMCAGAMIHSRIGRVVFGVRNAKTGA
AGSLMDVLHHPGMNHRVEITEGILADECAALLCRFFRMPRRVFNAQKKAQSSTDGSSGSETPGTS
ESATPESSGEDIQALKALEQYEKERQEQLLRDTLNTNEYRLSKRGLRGWREIIQKWLKMDENEPS
EKYLEVFKDYQRKHPREAGDYSVYEFLSKKENHFIWRNHPEYPYLYATFCEIDKKKKDAKQQATF
TLADPINHPLWVRFEERSGSNLNKYRILTEQLHTEKLKKKLTVQLDRLIYPTESGGWEEKGKVDI
VLLPSRQFYNQIFLDIEEKGKHAFTYKDESIKFPLKGTLGGARVQFDRDHLRRYPHKVESGNVGR
IYFNMTVNIEPTESPVSKSLKIHRDDFPKVVNFKPKELTEWIKDSKGKKLKSGIESLEIGLRVMS
IDLGQRQAAAASIFEVVDQKPDIEGKLEFPIKGTELYAVHRASFNIKLPGETLVKSREVLRKARE
DNLKLMNQKLNFLRNVLHFQQFEDITEREKRVTKWISRQENSDVPLVYQDELIQIRELMYKPYKD
WVAFLKQLHKRLEVEIGKEVKHWRKSLSDGRKGLYGISLKNIDEIDRTRKFLLRWSLRPTEPGEV
RRLEPGQRFAIDQLNHLNALKEDRLKKMANTIIMHALGYCYDVRKKKWQAKNPACQIILFEDLSN
YNPYEERSRFENSKLMKWSRREIPRQVALQGEIYGLQVGEVGAQFSSRFHAKTGSPGIRCSVVTK
EKLQDNRFFKNLQREGRLTLDKIAVLKEGDLYPDKGGEKFISLSKDRKCVTTHADINAAQNLQKR
FWTRTHGFYKVYCKAYQVDGQTVYIPESKDQKQKIIEEFGEGYFILKDGVYEWVNAGKLKIKKGS
SKQSSSELVDSDILKDSFDLASELKGEKLMLYRDPSGNVFPSDKWMAAGVFFGKLERILISKLTN
QYSISTIEDDSSKQSMKRPAATKKAGQAKKKKGSYPYDVPDYAYPYDVPDYAYPYDVPDYA
BhCasl2b GGSGGS-ABE8-Xten20 at D306 [symbol]
GCCACCAG
ATCCTTCATCCTGAAGATCGAGCCCAACGAGGAAGTGAAGAAAGGCCTCTGGAAAACCCACGAGG
TGCTGAACCACGGAATCGCCTACTACATGAATATCCTGAAGCTGATCCGGCAAGAGGCCATCTAC
GAGCACCACGAGCAGGACCCCAAGAATCCCAAGAAGGTGTCCAAGGCCGAGATCCAGGCCGAGCT
GTGGGATTTCGTGCTGAAGATGCAGAAGTGCAACAGCTTCACACACGAGGTGGACAAGGACGAGG
TGTTCAACATCCTGAGAGAGCTGTACGAGGAACTGGTGCCCAGCAGCGTGGAAAAGAAGGGCGAA
GCCAACCAGCTGAGCAACAAGTTTCTGTACCCTCTGGTGGACCCCAACAGCCAGTCTGGAAAGGG
AACAGCCAGCAGCGGCAGAAAGCCCAGATGGTACAACCTGAAGATTGCCGGCGATCCCTCCTGGG
AAGAAGAGAAGAAGAAGTGGGAAGAAGATAAGAAAAAGGACCCGCTGGCCAAGATCCTGGGCAAG
CTGGCTGAGTACGGACTGATCCCTCTGTTCATCCCCTACACCGACAGCAACGAGCCCATCGTGAA
AGAAATCAAGTGGATGGAAAAGTCCCGGAACCAGAGCGTGCGGCGGCTGGATAAGGACATGTTCA
TTCAGGCCCTGGAACGGTTCCTGAGCTGGGAGAGCTGGAACCTGAAAGTGAAAGAGGAATACGAG
AAGGTCGAGAAAGAGTACAAGACCCTGGAAGAGAGGATCAAAGAGGACATCCAGGCTCTGAAGGC
TCTGGAACAGTATGAGAAAGAGCGGCAAGAACAGCTGCTGCGGGACACCCTGAACACCAACGAGT
ACCGGCTGAGCAAGAGAGGCCTTAGAGGCTGGCGGGAAATCATCCAGAAATGGCTGAAAATGGAC

[chemical structure]

[chemical structure]

[chemical structure]

[chemical structure]

[chemical structure]

[chemical structure]

[chemical structure]

[chemical structure]

CTTCTGGATCTGAAACACCTGGCACAAGCGAGAGCGCCACCCCTGAGAGCTCTGGCGAGAACGAG
CCCTCCGAGAAGTACCTGGAAGTGTTCAAGGACTACCAGCGGAAGCACCCTAGAGAGGCCGGCGA
TTACAGCGTGTACGAGTTCCTGTCCAAGAAAGAGAACCACTTCATCTGGCGGAATCACCCTGAGT
ACCCCTACCTGTACGCCACCTTCTGCGAGATCGACAAGAAAAAGAAGGACGCCAAGCAGCAGGCC
ACCTTCACACTGGCCGATCCTATCAATCACCCTCTGTGGGTCCGATTCGAGGAAAGAAGCGGCAG
CAACCTGAACAAGTACAGAATCCTGACCGAGCAGCTGCACACCGAGAAGCTGAAGAAAAAGCTGA
CAGTGCAGCTGGACCGGCTGATCTACCCTACAGAATCTGGCGGCTGGGAAGAGAAGGGCAAAGTG
GACATTGTGCTGCTGCCCAGCCGGCAGTTCTACAACCAGATCTTCCTGGACATCGAGGAAAAGGG
CAAGCACGCCTTCACCTACAAGGATGAGAGCATCAAGTTCCCTCTGAAGGGCACACTCGGCGGAG
CCAGAGTGCAGTTCGACAGAGATCACCTGAGAAGATACCCTCACAAGGTGGAAAGCGGCAACGTG
GGCAGAATCTACTTCAACATGACCGTGAACATCGAGCCTACAGAGTCCCCAGTGTCCAAGTCTCT
GAAGATCCACCGGGACGACTTCCCCAAGGTGGTCAACTTCAAGCCCAAAGAACTGACCGAGTGGA
TCAAGGACAGCAAGGGCAAGAAACTGAAGTCCGGCATCGAGTCCCTGGAAATCGGCCTGAGAGTG
ATGAGCATCGACCTGGGACAGAGACAGGCCGCTGCCGCCTCTATTTTCGAGGTGGTGGATCAGAA
GCCCGACATCGAAGGCAAGCTGTTTTTCCCAATCAAGGGCACCGAGCTGTATGCCGTGCACAGAG
CCAGCTTCAACATCAAGCTGCCCGGCGAGACACTGGTCAAGAGCAGAGAAGTGCTGCGGAAGGCC
AGAGAGGACAATCTGAAACTGATGAACCAGAAGCTCAACTTCCTGCGGAACGTGCTGCACTTCCA
GCAGTTCGAGGACATCACCGAGAGAGAGAAGCGGGTCACCAAGTGGATCAGCAGACAAGAGAACA
GCGACGTGCCCCTGGTGTACCAGGATGAGCTGATCCAGATCCGCGAGCTGATGTACAAGCCTTAC
AAGGACTGGGTCGCCTTCCTGAAGCAGCTCCACAAGAGACTGGAAGTCGAGATCGGCAAAGAAGT
GAAGCACTGGCGGAAGTCCCTGAGCGACGGAAGAAAGGGCCTGTACGGCATCTCCCTGAAGAACA
TCGACGAGATCGATCGGACCCGGAAGTTCCTGCTGAGATGGTCCCTGAGGCCTACCGAACCTGGC
GAAGTGCGTAGACTGGAACCCGGCCAGAGATTCGCCATCGACCAGCTGAATCACCTGAACGCCCT
GAAAGAAGATCGGCTGAAGAAGATGGCCAACACCATCATCATGCACGCCCTGGGCTACTGCTACG
ACGTGCGGAAGAAGAAATGGCAGGCTAAGAACCCCGCCTGCCAGATCATCCTGTTCGAGGATCTG
AGCAACTACAACCCCTACGAGGAAAGGTCCCGCTTCGAGAACAGCAAGCTCATGAAGTGGTCCAG
ACGCGAGATCCCCAGACAGGTTGCACTGCAGGGCGAGATCTATGGCCTGCAAGTGGGAGAAGTGG
GCGCTCAGTTCAGCAGCAGATTCCACGCCAAGACAGGCAGCCCTGGCATCAGATGTAGCGTCGTG
ACCAAAGAGAAGCTGCAGGACAATCGGTTCTTCAAGAATCTGCAGAGAGAGGGCAGACTGACCCT
GGACAAAATCGCCGTGCTGAAAGAGGGCGATCTGTACCCAGACAAAGGCGGCGAGAAGTTCATCA
GCCTGAGCAAGGATCGGAAGTGCGTGACCACACACGCCGACATCAACGCCGCTCAGAACCTGCAG
AAGCGGTTCTGGACAAGAACCCACGGCTTCTACAAGGTGTACTGCAAGGCCTACCAGGTGGACGG
CCAGACCGTGTACATCCCTGAGAGCAAGGACCAGAAGCAGAAGATCATCGAAGAGTTCGGCGAGG
GCTACTTCATTCTGAAGGACGGGGTGTACGAATGGGTCAACGCCGGCAAGCTGAAAATCAAGAAG
GGCAGCTCCAAGCAGAGCAGCAGCGAGCTGGTGGATAGCGACATCCTGAAAGACAGCTTCGACCT
GGCCTCCGAGCTGAAAGGCGAAAAGCTGATGCTGTACAGGGACCCCAGCGGCAATGTGTTCCCCA
GCGACAAATGGATGGCCGCTGGCGTGTTCTTCGGAAAGCTGGAACGCATCCTGATCAGCAAGCTG
ACCAACCAGTACTCCATCAGCACCATCGAGGACGACAGCAGCAAGCAGTCTATGAAAAGGCCGGC
GGCCACGAAAAAGGCCGGCCAGGCAAAAAAGAAAAAG [symbol] TACCCATACGATGTTCCAGATT
ACGCTTATCCCTACGACGTGCCTGATTATGCATACCCATATGATGTCCCCGACTATGCCTAA
MAPKKKRKVGIHGVPAAATRSFILKIEPNEEVKKGLWKTHEVLNHGIAYYMNILKLIRQEAIYEH
HEQDPKNPKKVSKAEIQAELWDFVLKMQKCNSFTHEVDKDEVFNILRELYEELVPSSVEKKGEAN
QLSNKFLYPLVDPNSQSGKGTASSGRKPRWYNLKIAGDPSWEEEKKKWEEDKKKDPLAKILGKLA
EYGLIPLFIPYTDSNEPIVKEIKWMEKSRNQSVRRLDKDMFIQALERFLSWESWNLKVKEEYEKV
EKEYKTLEERIKEDIQALKALEQYEKERQEQLLRDTLNTNEYRLSKRGLRGWREIIQKWLKMDGG
SGGSSEVEFSHEYWMRHALTLAKRARDEREVPVGAVLVLNNRVIGEGWNRAIGLHDPTAHAEIMA
LRQGGLVMQNYRLYDATLYVTFEPCVMCAGAMIHSRIGRVVFGVRNAKTGAAGSLMDVLHHPGMN
HRVEITEGILADECAALLCRFFRMPRRVFNAQKKAQSSTDGSSGSETPGTSESATPESSGENEPS
EKYLEVFKDYQRKHPREAGDYSVYEFLSKKENHFIWRNHPEYPYLYATFCEIDKKKKDAKQQATF
TLADPINHPLWVRFEERSGSNLNKYRILTEQLHTEKLKKKLTVQLDRLIYPTESGGWEEKGKVDI
VLLPSRQFYNQIFLDIEEKGKHAFTYKDESIKFPLKGTLGGARVQFDRDHLRRYPHKVESGNVGR
IYFNMTVNIEPTESPVSKSLKIHRDDFPKVVNFKPKELTEWIKDSKGKKLKSGIESLEIGLRVMS
IDLGQRQAAAASIFEVVDQKPDIEGKLFFPIKGTELYAVHRASFNIKLPGETLVKSREVLRKARE
DNLKLMNQKLNFLRNVLHFQQFEDITEREKRVTKWISRQENSDVPLVYQDELIQIRELMYKPYKD
WVAFLKQLHKRLEVEIGKEVKHWRKSLSDGRKGLYGISLKNIDEIDRTRKFLLRWSLRPTEPGEV
RRLEPGQRFAIDQLNHLNALKEDRLKKMANTIIMHALGYCYDVRKKKWQAKNPACQIILFEDLSN
YNPYEERSRFENSKLMKWSRREIPRQVALQGEIYGLQVGEVGAQFSSRFHAKTGSPGIRCSVVTK
EKLQDNRFFKNLQREGRLTLDKIAVLKEGDLYPDKGGEKFISLSKDRKCVTTHADINAAQNLQKR
FWTRTHGFYKVYCKAYQVDGQTVYIPESKDQKQKIIEEFGEGYFILKDGVYEWVNAGKLKIKKGS
SKQSSSELVDSDILKDSFDLASELKGEKLMLYRDPSGNVFPSDKWMAAGVFFGKLERILISKLTN
QYSISTIEDDSSKQSMKRPAATKKAGQAKKKKGSYPYDVPDYAYPYDVPDYAYPYDVPDYA
BhCasl2b GGSGGS-ABE8-Xten20 at D980 [symbol]
GCCACCAG
ATCCTTCATCCTGAAGATCGAGCCCAACGAGGAAGTGAAGAAAGGCCTCTGGAAAACCCACGAGG
TGCTGAACCACGGAATCGCCTACTACATGAATATCCTGAAGCTGATCCGGCAAGAGGCCATCTAC
GAGCACCACGAGCAGGACCCCAAGAATCCCAAGAAGGTGTCCAAGGCCGAGATCCAGGCCGAGCT
GTGGGATTTCGTGCTGAAGATGCAGAAGTGCAACAGCTTCACACACGAGGTGGACAAGGACGAGG
TGTTCAACATCCTGAGAGAGCTGTACGAGGAACTGGTGCCCAGCAGCGTGGAAAAGAAGGGCGAA
GCCAACCAGCTGAGCAACAAGTTTCTGTACCCTCTGGTGGACCCCAACAGCCAGTCTGGAAAGGG
AACAGCCAGCAGCGGCAGAAAGCCCAGATGGTACAACCTGAAGATTGCCGGCGATCCCTCCTGGG
AAGAAGAGAAGAAGAAGTGGGAAGAAGATAAGAAAAAGGACCCGCTGGCCAAGATCCTGGGCAAG
CTGGCTGAGTACGGACTGATCCCTCTGTTCATCCCCTACACCGACAGCAACGAGCCCATCGTGAA
AGAAATCAAGTGGATGGAAAAGTCCCGGAACCAGAGCGTGCGGCGGCTGGATAAGGACATGTTCA
TTCAGGCCCTGGAACGGTTCCTGAGCTGGGAGAGCTGGAACCTGAAAGTGAAAGAGGAATACGAG
AAGGTCGAGAAAGAGTACAAGACCCTGGAAGAGAGGATCAAAGAGGACATCCAGGCTCTGAAGGC
TCTGGAACAGTATGAGAAAGAGCGGCAAGAACAGCTGCTGCGGGACACCCTGAACACCAACGAGT
ACCGGCTGAGCAAGAGAGGCCTTAGAGGCTGGCGGGAAATCATCCAGAAATGGCTGAAAATGGAC
GAGAACGAGCCCTCCGAGAAGTACCTGGAAGTGTTCAAGGACTACCAGCGGAAGCACCCTAGAGA
GGCCGGCGATTACAGCGTGTACGAGTTCCTGTCCAAGAAAGAGAACCACTTCATCTGGCGGAATC
ACCCTGAGTACCCCTACCTGTACGCCACCTTCTGCGAGATCGAGAAGAAAAAGAAGGAGGCCAAG
CAGCAGGCCACCTTCACACTGGCCGATCCTATCAATCACCCTCTGTGGGTCCGATTCGAGGAAAG
AAGCGGCAGCAACCTGAACAAGTACAGAATCCTGACCGAGCAGCTGCACACCGAGAAGCTGAAGA
AAAAGCTGACAGTGCAGCTGGACCGGCTGATCTACCCTACAGAATCTGGCGGCTGGGAAGAGAAG
GGCAAAGTGGACATTGTGCTGCTGCCCAGCCGGCAGTTCTACAACCAGATCTTCCTGGACATCGA
GGAAAAGGGCAAGCACGCCTTCACCTACAAGGATGAGAGCATCAAGTTCCCTCTGAAGGGCACAC
TCGGCGGAGCCAGAGTGCAGTTCGACAGAGATCACCTGAGAAGATACCCTCACAAGGTGGAAAGC
GGCAACGTGGGCAGAATCTACTTCAACATGACCGTGAACATCGAGCCTACAGAGTCCCCAGTGTC
CAAGTCTCTGAAGATCCACCGGGACGACTTCCCCAAGGTGGTCAACTTCAAGCCCAAAGAACTGA
CCGAGTGGATCAAGGACAGCAAGGGCAAGAAACTGAAGTCCGGCATCGAGTCCCTGGAAATCGGC
CTGAGAGTGATGAGCATCGACCTGGGACAGAGACAGGCCGCTGCCGCCTCTATTTTCGAGGTGGT
GGATCAGAAGCCCGACATCGAAGGCAAGCTGTTTTTCCCAATCAAGGGCACCGAGCTGTATGCCG
TGCACAGAGCCAGCTTCAACATCAAGCTGCCCGGCGAGACACTGGTCAAGAGCAGAGAAGTGCTG
CGGAAGGCCAGAGAGGACAATCTGAAACTGATGAACCAGAAGCTCAACTTCCTGCGGAACGTGCT
GCACTTCCAGCAGTTCGAGGACATCACCGAGAGAGAGAAGCGGGTCACCAAGTGGATCAGCAGAC
AAGAGAACAGCGACGTGCCCCTGGTGTACCAGGATGAGCTGATCCAGATCCGCGAGCTGATGTAC
AAGCCTTACAAGGACTGGGTCGCCTTCCTGAAGCAGCTCCACAAGAGACTGGAAGTCGAGATCGG
CAAAGAAGTGAAGCACTGGCGGAAGTCCCTGAGCGACGGAAGAAAGGGCCTGTACGGCATCTCCC
TGAAGAACATCGACGAGATCGATCGGACCCGGAAGTTCCTGCTGAGATGGTCCCTGAGGCCTACC
GAACCTGGCGAAGTGCGTAGACTGGAACCCGGCCAGAGATTCGCCATCGACCAGCTGAATCACCT
GAACGCCCTGAAAGAAGATCGGCTGAAGAAGATGGCCAACACCATCATCATGCACGCCCTGGGCT
ACTGCTACGACGTGCGGAAGAAGAAATGGCAGGCTAAGAACCCCGCCTGCCAGATCATCCTGTTC
GAGGATCTGAGCAACTACAACCCCTACGAGGAAAGGTCCCGCTTCGAGAACAGCAAGCTCATGAA
GTGGTCCAGACGCGAGATCCCCAGACAGGTTGCACTGCAGGGCGAGATCTATGGCCTGCAAGTGG
GAGAAGTGGGCGCTCAGTTCAGCAGCAGATTCCACGCCAAGACAGGCAGCCCTGGCATCAGATGT
AGCGTCGTGACCAAAGAGAAGCTGCAGGACAATCGGTTCTTCAAGAATCTGCAGAGAGAGGGCAG
ACTGACCCTGGACAAAATCGCCGTGCTGAAAGAGGGCGATCTGTACCCAGACAAAGGCGGCGAGA
AGTTCATCAGCCTGAGCAAGGATCGGAAGTGCGTGACCACACACGCCGACATCAACGCCGCTCAG
AACCTGCAGAAGCGGTTCTGGACAAGAACCCACGGCTTCTACAAGGTGTACTGCAAGGCCTACCA

[chemical structure]

[chemical structure]

[chemical structure]

[chemical structure]

[chemical structure]

[chemical structure]

[chemical structure]

[chemical structure]

[chemical structure]

CCAGACCGTGTACATCCCTGAGAGCAAGGACCAGAAGCAGAAGATCATCGAAGAGTTCGGCGAGG
GCTACTTCATTCTGAAGGACGGGGTGTACGAATGGGTCAACGCCGGCAAGCTGAAAATCAAGAAG
GGCAGCTCCAAGCAGAGCAGCAGCGAGCTGGTGGATAGCGACATCCTGAAAGACAGCTTCGACCT
GGCCTCCGAGCTGAAAGGCGAAAAGCTGATGCTGTACAGGGACCCCAGCGGCAATGTGTTCCCCA
GCGACAAATGGATGGCCGCTGGCGTGTTCTTCGGAAAGCTGGAACGCATCCTGATCAGCAAGCTG
ACCAACCAGTACTCCATCAGCACCATCGAGGACGACAGCAGCAAGCAGTCTATGAAAAGGCCGGC
GGCCACGAAAAAGGCCGGCCAGGCAAAAAAGAAAAAG [symbol] TACCCATACGATGTTCCAGATT
ACGCTTATCCCTACGACGTGCCTGATTATGCATACCCATATGATGTCCCCGACTATGCCTAA
MAPKKKRKVGIHGVPAAATRSFILKIEPNEEVKKGLWKTHEVLNHGIAYYMNILKLIRQEAIYEH
HEQDPKNPKKVSKAEIQAELWDFVLKMQKCNSFTHEVDKDEVFNILRELYEELVPSSVEKKGEAN
QLSNKFLYPLVDPNSQSGKGTASSGRKPRWYNLKIAGDPSWEEEKKKWEEDKKKDPLAKILGKLA
EYGLIPLFIPYTDSNEPIVKEIKWMEKSRNQSVRRLDKDMFIQALERFLSWESWNLKVKEEYEKV
EKEYKTLEERIKEDIQALKALEQYEKERQEQLLRDTLNTNEYRLSKRGLRGWREIIQKWLKMDEN
EPSEKYLEVFKDYQRKHPREAGDYSVYEFLSKKENHFIWRNHPEYPYLYATFCEIDKKKKDAKQQ
ATFTLADPINHPLWVRFEERSGSNLNKYRILTEQLHTEKLKKKLTVQLDRLIYPTESGGWEEKGK
VDIVLLPSRQFYNQIFLDIEEKGKHAFTYKDESIKFPLKGTLGGARVQFDRDHLRRYPHKVESGN
VGRIYFNMTVNIEPTESPVSKSLKIHRDDFPKVVNFKPKELTEWIKDSKGKKLKSGIESLEIGLR
VMSIDLGQRQAAAASIFEVVDQKPDIEGKLFFPIKGTELYAVHRASFNIKLPGETLVKSREVLRK
AREDNLKLMNQKLNFLRNVLHFQQFEDITEREKRVTKWISRQENSDVPLVYQDELIQIRELMYKP
YKDWVAFLKQLHKRLEVEIGKEVKHWRKSLSDGRKGLYGISLKNIDEIDRTRKFLLRWSLRPTEP
GEVRRLEPGQRFAIDQLNHLNALKEDRLKKMANTIIMHALGYCYDVRKKKWQAKNPACQIILFED
LSNYNPYEERSRFENSKLMKWSRREIPRQVALQGEIYGLQVGEVGAQFSSRFHAKTGSPGIRCSV
VTKEKLQDNRFFKNLQREGRLTLDKIAVLKEGDLYPDKGGEKFISLSKDRKCVTTHADINAAQNL
QKRFWTRTHGFYKVYCKAYQVDGGSGGSSEVEFSHEYWMRHALTLAKRARDEREVPVGAVLVLNN
RVIGEGWNRAIGLHDPTAHAEIMALRQGGLVMQNYRLYDATLYVTFEPCVMCAGAMIHSRIGRVV
FGVRNAKTGAAGSLMDVLHHPGMNHRVEITEGILADECAALLCRFFRMPRRVFNAQKKAQSSTDG
SSGSETPGTSESATPESSGGQTVYIPESKDQKQKIIEEFGEGYFILKDGVYEWVNAGKLKIKKGS
SKQSSSELVDSDILKDSFDLASELKGEKLMLYRDPSGNVFPSDKWMAAGVFFGKLERILISKLTN
QYSISTIEDDSSKQSMKRPAATKKAGQAKKKKGSYPYDVPDYAYPYDVPDYAYPYDVPDYA
BhCasl2b GGSGGS-ABE8-Xten20 at K1019 [symbol]
GCCACCAG
ATCCTTCATCCTGAAGATCGAGCCCAACGAGGAAGTGAAGAAAGGCCTCTGGAAAACCCACGAGG
TGCTGAACCACGGAATCGCCTACTACATGAATATCCTGAAGCTGATCCGGCAAGAGGCCATCTAC
GAGCACCACGAGCAGGACCCCAAGAATCCCAAGAAGGTGTCCAAGGCCGAGATCCAGGCCGAGCT
GTGGGATTTCGTGCTGAAGATGCAGAAGTGCAACAGCTTCACACACGAGGTGGACAAGGACGAGG
TGTTCAACATCCTGAGAGAGCTGTACGAGGAACTGGTGCCCAGCAGCGTGGAAAAGAAGGGCGAA
GCCAACCAGCTGAGCAACAAGTTTCTGTACCCTCTGGTGGACCCCAACAGCCAGTCTGGAAAGGG
AACAGCCAGCAGCGGCAGAAAGCCCAGATGGTACAACCTGAAGATTGCCGGCGATCCCTCCTGGG
AAGAAGAGAAGAAGAAGTGGGAAGAAGATAAGAAAAAGGACCCGCTGGCCAAGATCCTGGGCAAG
CTGGCTGAGTACGGACTGATCCCTCTGTTCATCCCCTACACCGACAGCAACGAGCCCATCGTGAA
AGAAATCAAGTGGATGGAAAAGTCCCGGAACCAGAGCGTGCGGCGGCTGGATAAGGACATGTTCA
TTCAGGCCCTGGAACGGTTCCTGAGCTGGGAGAGCTGGAACCTGAAAGTGAAAGAGGAATACGAG
AAGGTCGAGAAAGAGTACAAGACCCTGGAAGAGAGGATCAAAGAGGACATCCAGGCTCTGAAGGC
TCTGGAACAGTATGAGAAAGAGCGGCAAGAACAGCTGCTGCGGGACACCCTGAACACCAACGAGT
ACCGGCTGAGCAAGAGAGGCCTTAGAGGCTGGCGGGAAATCATCCAGAAATGGCTGAAAATGGAC
GAGAACGAGCCCTCCGAGAAGTACCTGGAAGTGTTCAAGGACTACCAGCGGAAGCACCCTAGAGA
GGCCGGCGATTACAGCGTGTACGAGTTCCTGTCCAAGAAAGAGAACCACTTCATCTGGCGGAATC
ACCCTGAGTACCCCTACCTGTACGCCACCTTCTGCGAGATCGAGAAGAAAAAGAAGGAGGCCAAG
CAGCAGGCCACCTTCACACTGGCCGATCCTATCAATCACCCTCTGTGGGTCCGATTCGAGGAAAG
AAGCGGCAGCAACCTGAACAAGTACAGAATCCTGACCGAGCAGCTGCACACCGAGAAGCTGAAGA
AAAAGCTGACAGTGCAGCTGGACCGGCTGATCTACCCTACAGAATCTGGCGGCTGGGAAGAGAAG
GGCAAAGTGGACATTGTGCTGCTGCCCAGCCGGCAGTTCTACAACCAGATCTTCCTGGACATCGA
GGAAAAGGGCAAGCACGCCTTCACCTACAAGGATGAGAGCATCAAGTTCCCTCTGAAGGGCACAC
TCGGCGGAGCCAGAGTGCAGTTCGACAGAGATCACCTGAGAAGATACCCTCACAAGGTGGAAAGC
GGCAACGTGGGCAGAATCTACTTCAACATGACCGTGAACATCGAGCCTACAGAGTCCCCAGTGTC
CAAGTCTCTGAAGATCCACCGGGACGACTTCCCCAAGGTGGTCAACTTCAAGCCCAAAGAACTGA
CCGAGTGGATCAAGGACAGCAAGGGCAAGAAACTGAAGTCCGGCATCGAGTCCCTGGAAATCGGC
CTGAGAGTGATGAGCATCGACCTGGGACAGAGACAGGCCGCTGCCGCCTCTATTTTCGAGGTGGT
GGATCAGAAGCCCGACATCGAAGGCAAGCTGTTTTTCCCAATCAAGGGCACCGAGCTGTATGCCG
TGCACAGAGCCAGCTTCAACATCAAGCTGCCCGGCGAGACACTGGTCAAGAGCAGAGAAGTGCTG
CGGAAGGCCAGAGAGGACAATCTGAAACTGATGAACCAGAAGCTCAACTTCCTGCGGAACGTGCT
GCACTTCCAGCAGTTCGAGGACATCACCGAGAGAGAGAAGCGGGTCACCAAGTGGATCAGCAGAC
AAGAGAACAGCGACGTGCCCCTGGTGTACCAGGATGAGCTGATCCAGATCCGCGAGCTGATGTAC
AAGCCTTACAAGGACTGGGTCGCCTTCCTGAAGCAGCTCCACAAGAGACTGGAAGTCGAGATCGG
CAAAGAAGTGAAGCACTGGCGGAAGTCCCTGAGCGACGGAAGAAAGGGCCTGTACGGCATCTCCC
TGAAGAACATCGACGAGATCGATCGGACCCGGAAGTTCCTGCTGAGATGGTCCCTGAGGCCTACC
GAACCTGGCGAAGTGCGTAGACTGGAACCCGGCCAGAGATTCGCCATCGACCAGCTGAATCACCT
GAACGCCCTGAAAGAAGATCGGCTGAAGAAGATGGCCAACACCATCATCATGCACGCCCTGGGCT
ACTGCTACGACGTGCGGAAGAAGAAATGGCAGGCTAAGAACCCCGCCTGCCAGATCATCCTGTTC
GAGGATCTGAGCAACTACAACCCCTACGAGGAAAGGTCCCGCTTCGAGAACAGCAAGCTCATGAA
GTGGTCCAGACGCGAGATCCCCAGACAGGTTGCACTGCAGGGCGAGATCTATGGCCTGCAAGTGG
GAGAAGTGGGCGCTCAGTTCAGCAGCAGATTCCACGCCAAGACAGGCAGCCCTGGCATCAGATGT
AGCGTCGTGACCAAAGAGAAGCTGCAGGACAATCGGTTCTTCAAGAATCTGCAGAGAGAGGGCAG
ACTGACCCTGGACAAAATCGCCGTGCTGAAAGAGGGCGATCTGTACCCAGACAAAGGCGGCGAGA
AGTTCATCAGCCTGAGCAAGGATCGGAAGTGCGTGACCACACACGCCGACATCAACGCCGCTCAG
AACCTGCAGAAGCGGTTCTGGACAAGAACCCACGGCTTCTACAAGGTGTACTGCAAGGCCTACCA
GGTGGACGGCCAGACCGTGTACATCCCTGAGAGCAAGGACCAGAAGCAGAAGATCATCGAAGAGT
TCGGCGAGGGCTACTTCATTCTGAAGGACGGGGTGTACGAATGGGTCAACGCCGGCAAGggaggc

[chemical structure]

[chemical structure]

[chemical structure]

[chemical structure]

[chemical structure]

[chemical structure]

[chemical structure]

[chemical structure]

GATCTGAAACACCTGGCACAAGCGAGAGCGCCACCCCTGAGAGCTCTGGCCTGAAAATCAAGAAG
GGCAGCTCCAAGCAGAGCAGCAGCGAGCTGGTGGATAGCGACATCCTGAAAGACAGCTTCGACCT
GGCCTCCGAGCTGAAAGGCGAAAAGCTGATGCTGTACAGGGACCCCAGCGGCAATGTGTTCCCCA
GCGACAAATGGATGGCCGCTGGCGTGTTCTTCGGAAAGCTGGAACGCATCCTGATCAGCAAGCTG
ACCAACCAGTACTCCATCAGCACCATCGAGGACGACAGCAGCAAGCAGTCTATGAAAAGGCCGGC
GGCCACGAAAAAGGCCGGCCAGGCAAAAAAGAAAAAG [symbol] TACCCATACGATGTTCCAGATT
ACGCTTATCCCTACGACGTGCCTGATTATGCATACCCATATGATGTCCCCGACTATGCCTAA
MAPKKKRKVGIHGVPAAATRSFILKIEPNEEVKKGLWKTHEVLNHGIAYYMNILKLIRQEAIYEH
HEQDPKNPKKVSKAEIQAELWDFVLKMQKCNSFTHEVDKDEVFNILRELYEELVPSSVEKKGEAN
QLSNKFLYPLVDPNSQSGKGTASSGRKPRWYNLKIAGDPSWEEEKKKWEEDKKKDPLAKILGKLA
EYGLIPLFIPYTDSNEPIVKEIKWMEKSRNQSVRRLDKDMFIQALERFLSWESWNLKVKEEYEKV
EKEYKTLEERIKEDIQALKALEQYEKERQEQLLRDTLNTNEYRLSKRGLRGWREIIQKWLKMDEN
EPSEKYLEVFKDYQRKHPREAGDYSVYEFLSKKENHFIWRNHPEYPYLYATFCEIDKKKKDAKQQ
ATFTLADPINHPLWVRFEERSGSNLNKYRILTEQLHTEKLKKKLTVQLDRLIYPTESGGWEEKGK
VDIVLLPSRQFYNQIFLDIEEKGKHAFTYKDESIKFPLKGTLGGARVQFDRDHLRRYPHKVESGN
VGRIYFNMTVNIEPTESPVSKSLKIHRDDFPKVVNFKPKELTEWIKDSKGKKLKSGIESLEIGLR
VMSIDLGQRQAAAASIFEVVDQKPDIEGKLFFPIKGTELYAVHRASFNIKLPGETLVKSREVLRK
AREDNLKLMNQKLNFLRNVLHFQQFEDITEREKRVTKWISRQENSDVPLVYQDELIQIRELMYKP
YKDWVAFLKQLHKRLEVEIGKEVKHWRKSLSDGRKGLYGISLKNIDEIDRTRKFLLRWSLRPTEP
GEVRRLEPGQRFAIDQLNHLNALKEDRLKKMANTIIMHALGYCYDVRKKKWQAKNPACQIILFED
LSNYNPYEERSRFENSKLMKWSRREIPRQVALQGEIYGLQVGEVGAQFSSRFHAKTGSPGIRCSV
VTKEKLQDNRFFKNLQREGRLTLDKIAVLKEGDLYPDKGGEKFISLSKDRKCVTTHADINAAQNL
QKRFWTRTHGFYKVYCKAYQVDGQTVYIPESKDQKQKIIEEFGEGYFILKDGVYEWVNAGKGGSG
GSSEVEFSHEYWMRHALTLAKRARDEREVPVGAVLVLNNRVIGEGWNRAIGLHDPTAHAEIMALR
QGGLVMQNYRLYDATLYVTFEPCVMCAGAMIHSRIGRVVFGVRNAKTGAAGSLMDVLHHPGMNHR
VEITEGILADECAALLCRFFRMPRRVFNAQKKAQSSTDGSSGSETPGTSESATPESSGLKIKKGS
SKQSSSELVDSDILKDSFDLASELKGEKLMLYRDPSGNVFPSDKWMAAGVFFGKLERILISKLTN
QYSISTIEDDSSKQSMKRPAATKKAGQAKKKKGSYPYDVPDYAYPYDVPDYAYPYDVPDYA

[0262] For the sequences above, the Kozak sequence is bolded and underlined; [symbol] marks the N-terminal nuclear localization signal (NLS); lower case characters denote the GGGSGGS linker; [symbol] marks the sequence encoding ABE8, unmodified sequence encodes BhCas12b; double underling denotes the Xten20 linker; single underlining denotes the C-terminal NLS; [symbol] denotes the GS linker; and italicized characters represent the coding sequence of the 3x hemagglutinin (HA) tag.

[0263] In some embodiments, the Cas9 domain is a Cas9 domain from Staphylococcus aureus (SaCas9). In some embodiments, the SaCas9 domain is a nuclease active SaCas9, a nuclease inactive SaCas9 (SaCas9d), or a SaCas9 nickase (SaCas9n). In some embodiments, the SaCas9 comprises a N579A mutation, or a corresponding mutation in any of the amino acid sequences provided herein.

[0264] In some embodiments, the SaCas9 domain, the SaCas9d domain, or the SaCas9n domain can bind to a nucleic acid sequence having a non-canonical PAM. In some embodiments, the SaCas9 domain, the SaCas9d domain, or the SaCas9n domain can bind to a nucleic acid sequence having a NNGRRT or a NNNRRT PAM sequence. In some embodiments, the SaCas9 domain comprises one or more of a E781X, a N967X, and a R1014X mutation, or a corresponding mutation in any of the amino acid sequences provided herein, wherein X is any amino acid. In some embodiments, the SaCas9 domain comprises one or more of a E781K, a N967K, and a R1014H mutation, or one or more corresponding mutation in any of the amino acid sequences provided herein. In some embodiments, the SaCas9 domain comprises a E781K, a N967K, or a R1014H mutation, or corresponding mutations in any of the amino acid sequences provided herein.

[0265] In some embodiments, the variant Cas protein can be SpCas9, SpCas9-VRQR, SpCas9-VRER, xCas9 (sp), SaCas9, SaCas9-KKH, SpCas9-MQKSER, SpCas9-LRKIQK, or SpCas9-LRVSQL.

[0266] Exemplary SaCas9 Sequence

KRNYILGLDIGITSVGYG11DYETRDVIDAGVRLFKEANVENNEGRRSK
RGARRLKRRRRHRIQRVKKLLFDYNLLTDHSELSGINPYEARVKGLSQK
LSEEEFSAALLHLAKRRGVHNVNEVEEDTGNELSTKEQISRNSKALEEK
YVAELQLERLKKDGEVRGSINRFKTSDYVKEAKQLLKVQKAYHQLDQSF
IDTYIDLLETRRTYYEGPGEGSPFGWKDIKEWYEMLMGHCTYFPEELRS
VKYAYNADLYNALNDLNNLVITRDENEKLEYYEKFQIIENVFKQKKKPT
LKQIAKEILVNEEDIKGYRVTSTGKPEFTNLKVYHDIKDITARKEIIEN
AELLDQIAKILTIYQSSEDIQEELTNLNSELTQEEIEQISNLKGYTGTH
NLSLKAINLILDELWHTNDNQIAIFNRLKLVPKKVDLSQQKEIPTTLVD
DFILSPVVKRSFIQSIKVINAIIKKYGLPNDIIIELAREKNSKDAQKMI
NEMQKRNRQTNERIEEIIRTTGKENAKYLIEKIKLHDMQEGKCLYSLEA
IPLEDLLNNPFNYEVDHIIPRSVSFDNSFNNKVLVKQEE [symbol] SKKGNRTPF
QYLSSSDSKISYETFKKHILNLAKGKGRISKTKKEYLLEERDINRFSVQ
KDFINRNLVDTRYATRGLMNLLRSYFRVNNLDVKVKSINGGFTSFLRRK
WKFKKERNKGYKHHAEDALIIANADFIFKEWKKLDKAKKVMENQMFEEK
QAESMPEIETEQEYKEIFITPHQIKHIKDFKDYKYSHRVDKKPNRELIN
DTLYSTRKDDKGNTLIVNNLNGLYDKDNDKLKKLINKSPEKLLMYHHDP
QTYQKLKLIMEQYGDEKNPLYKYYEETGNYLTKYSKKDNGPVIKKIKYY
GNKLNAHLDITDDYPNSRNKVVKLSLKPYRFDVYLDNGVYKFVTVKNLD
VIKKENYYEVNSKCYEEAKKLKKISNQAEFIASFYNNDLIKINGELYRV
IGVNNDLLNRIEVNMIDITYREYLENMNDKRPPRIIKTIASKTQSIKKY
STDILGNLYEVKSKKHPQIIKKG

Residue N579 above, which is underlined and in bold, may be mutated (e.g., to a A579) to yield a SaCas9 nickase.

[0267] Exemplary SaCas9n Sequence

KRNYILGLDIGITSVGYG11DYETRDVIDAGVRLFKEANVENNEGRRSK
RGARRLKRRRRHRIQRVKKLLFDYNLLTDHSELSGINPYEARVKGLSQK
LSEEEFSAALLHLAKRRGVHNVNEVEEDTGNELSTKEQISRNSKALEEK
YVAELQLERLKKDGEVRGSINRFKTSDYVKEAKQLLKVQKAYHQLDQSF
IDTYIDLLETRRTYYEGPGEGSPFGWKDIKEWYEMLMGHCTYFPEELRS
VKYAYNADLYNALNDLNNLVITRDENEKLEYYEKFQIIENVFKQKKKPT
LKQIAKEILVNEEDIKGYRVTSTGKPEFTNLKVYHDIKDITARKEIIEN
AELLDQIAKILTIYQSSEDIQEELTNLNSELTQEEIEQISNLKGYTGTH
NLSLKAINLILDELWHTNDNQIAIFNRLKLVPKKVDLSQQKEIPTTLVD
DFILSPVVKRSFIQSIKVINAIIKKYGLPNDIIIELAREKNSKDAQKMI
NEMQKRNRQTNERIEEIIRTTGKENAKYLIEKIKLHDMQEGKCLYSLEA
IPLEDLLNNPFNYEVDHIIPRSVSFDNSFNNKVLVKQEEASKKGNRTPF
QYLSSSDSKISYETFKKHILNLAKGKGRISKTKKEYLLEERDINRFSVQ
KDFINRNLVDTRYATRGLMNLLRSYFRVNNLDVKVKSINGGFTSFLRRK
WKFKKERNKGYKHHAEDALIIANADFIFKEWKKLDKAKKVMENQMFEEK
QAESMPEIETEQEYKEIFITPHQIKHIKDFKDYKYSHRVDKKPNRELIN
DTLYSTRKDDKGNTLIVNNLNGLYDKDNDKLKKLINKSPEKLLMYHHDP
QTYQKLKLIMEQYGDEKNPLYKYYEETGNYLTKYSKKDNGPVIKKIKYY
GNKLNAHLDITDDYPNSRNKVVKLSLKPYRFDVYLDNGVYKFVTVKNLD
VIKKENYYEVNSKCYEEAKKLKKISNQAEFIASFYNNDLIKINGELYRV
IGVNNDLLNRIEVNMIDITYREYLENMNDKRPPRIIKTIASKTQSIKKY
STDILGNLYEVKSKKHPQIIKKG

[0268] Residue A579 above, which can be mutated from N579 to yield a SaCas9 nickase, is underlined and in bold.

[0269] Exemplary SaKKH Cas9

KRNYILGLDIGITSVGYGIIDYETRDVIDAGVRLFKEANVENNEGRRSKRG
ARRLKRRRRHRIQRVKKLLFDYNLLTDHSELSGINPYEARVKGLSQKLSEE
EFSAALLHLAKRRGVHNVNEVEEDTGNELSTKEQISRNSKALEEKYVAELQ
LERLKKDGEVRGSINREKTSDYVKEAKQLLKVQKAYHQLDQSFIDTYIDLL
ETRRTYYEGPGEGSPFGWKDIKEWYEMLMGHCTYFPEELRSVKYAYNADLY
NALNDLNNLVITRDENEKLEYYEKFQIIENVFKQKKKPTLKQIAKEILVNE
EDIKGYRVTSTGKPEFTNLKVYHDIKDITARKEIIENAELLDQIAKILTIY
QSSEDIQEELTNLNSELTQEEIEQISNLKGYTGTHNLSLKAINLILDELWH
TNDNQIAIFNRLKLVPKKVDLSQQKEIPTTLVDDFILSPVVKRSFIQSIKV
INAIIKKYGLPNDIIIELAREKNSKDAQKMINEMQKRNRQTNERIEEIIRT
TGKENAKYLIEKIKLHDMQEGKCLYSLEAIPLEDLLNNPFNYEVDHIIPRS
VSFDNSFNNKVLVKQEE [symbol] SKKGNRTPFQYLSSSDSKISYETFKKHILNLAK
GKGRISKTKKEYLLEERDINRFSVQKDFINRNLVDTRYATRGLMNLLRSYF
RVNNLDVKVKSINGGFTSFLRRKWKFKKERNKGYKHHAEDALIIANADFIF
KEWKKLDKAKKVMENQMFEEKQAESMPEIETEQEYKEIFITPHQIKHIKDF
KDYKYSHRVDKKPNRKLINDTLYSTRKDDKGNTLIVNNLNGLYDKDNDKLK
KLINKSPEKLLMYHHDPQTYQKLKLIMEQYGDEKNPLYKYYEETGNYLTKY
SKKDNGPVIKKIKYYGNKLNAHLDITDDYPNSRNKVVKLSLKPYRFDVYLD
NGVYKFVTVKNLDVIKKENYYEVNSKCYEEAKKLKKISNQAEFIASFYKND
LIKINGELYRVIGVNNDLLNRIEVNMIDITYREYLENMNDKRPPHIIKTIA
SKTQSIKKYSTDILGNLYEVKSKKHPQIIKKG.

[0270] Residue A579 above, which can be mutated from N579 to yield a SaCas9 nickase, is underlined and in bold. Residues K781, K967, and H1014 above, which can be mutated from E781, N967, and R1014 to yield a SaKKH Cas9 are underlined and in italics.

[0271] A polynucleotide programmable nucleotide binding domain of a base editor can itself comprise one or more domains. For example, a polynucleotide programmable nucleotide binding domain can comprise one or more nuclease domains. In some embodiments, the nuclease domain of a polynucleotide programmable nucleotide binding domain can comprise an endonuclease or an exonuclease. Herein the term “exonuclease” refers to a protein or polypeptide capable of digesting a nucleic acid (e.g., RNA or DNA) from free ends, and the term “endonuclease” refers to a protein or polypeptide capable of catalyzing (e.g., cleaving) internal regions in a nucleic acid (e.g., DNA or RNA). In some embodiments, an endonuclease can cleave a single strand of a double-stranded nucleic acid. In some embodiments, an endonuclease can cleave both strands of a double-stranded nucleic acid molecule. In some embodiments a polynucleotide programmable nucleotide binding domain can be a deoxyribonuclease. In some embodiments a polynucleotide programmable nucleotide binding domain can be a ribonuclease.

[0272] In some embodiments, a nuclease domain of a polynucleotide programmable nucleotide binding domain can cut zero, one, or two strands of a target polynucleotide. In some embodiments, the polynucleotide programmable nucleotide binding domain can comprise a nickase domain. Herein the term “nickase” refers to a polynucleotide programmable nucleotide binding domain comprising a nuclease domain that is capable of cleaving only one strand of the two strands in a duplexed nucleic acid molecule (e.g., DNA). In some embodiments, a nickase can be derived from a fully catalytically active (e.g., natural) form of a polynucleotide programmable nucleotide binding domain by introducing one or more mutations into the active polynucleotide programmable nucleotide binding domain. For example, where a polynucleotide programmable nucleotide binding domain comprises a nickase domain derived from Cas9, the Cas9-derived nickase domain can include a D10A mutation and a histidine at position 840. In such embodiments, the residue H840 retains catalytic activity and can thereby cleave a single strand of the nucleic acid duplex. In another example, a Cas9-derived nickase domain can comprise an H840A mutation, while the amino acid residue at position 10 remains a D. In some embodiments, a nickase can be derived from a fully catalytically active (e.g., natural) form of a polynucleotide programmable nucleotide binding domain by removing all or a portion of a nuclease domain that is not required for the nickase activity. For example, where a polynucleotide programmable nucleotide binding domain comprises a nickase domain derived from Cas9, the Cas9-derived nickase domain can comprise a deletion of all or a portion of the RuvC domain or the HNH domain.

[0273] A base editor comprising a polynucleotide programmable nucleotide binding domain comprising a nickase domain is thus able to generate a single-strand DNA break (nick) at a specific polynucleotide target sequence (e.g., determined by the complementary sequence of a bound guide nucleic acid). In some embodiments, the strand of a nucleic acid duplex target polynucleotide sequence that is cleaved by a base editor comprising a nickase domain (e.g., Cas9-derived nickase domain) is the strand that is not edited by the base editor (i.e., the strand that is cleaved by the base editor is opposite to a strand comprising a base to be edited). In other embodiments, a base editor comprising a nickase domain (e.g., Cas9-derived nickase domain) can cleave the strand of a DNA molecule which is being targeted for editing. In such embodiments, the non-targeted strand is not cleaved.

[0274] Also provided herein are base editors comprising a polynucleotide programmable nucleotide binding domain which is catalytically dead (i.e., incapable of cleaving a target polynucleotide sequence). Herein the terms “catalytically dead” and “nuclease dead” are used interchangeably to refer to a polynucleotide programmable nucleotide binding domain which has one or more mutations and/or deletions resulting in its inability to cleave a strand of a nucleic acid. In some embodiments, a catalytically dead polynucleotide programmable nucleotide binding domain base editor can lack nuclease activity as a result of specific point mutations in one or more nuclease domains. For example, in the case of a base editor comprising a Cas9 domain, the Cas9 can comprise both a D10A mutation and an H840A mutation. Such mutations inactivate both nuclease domains, thereby resulting in the loss of nuclease activity. In other embodiments, a catalytically dead polynucleotide programmable nucleotide binding domain can comprise one or more deletions of all or a portion of a catalytic domain (e.g., RuvC1 and/or HNH domains). In further embodiments, a catalytically dead polynucleotide programmable nucleotide binding domain comprises a point mutation (e.g., D10A or H840A) as well as a deletion of all or a portion of a nuclease domain.

[0275] Also contemplated herein are mutations capable of generating a catalytically dead polynucleotide programmable nucleotide binding domain from a previously functional version of the polynucleotide programmable nucleotide binding domain. For example, in the case of catalytically dead Cas9 (“dCas9”), variants having mutations other than D10A and H840A are provided, which result in nuclease inactivated Cas9. Such mutations, by way of example, include other amino acid substitutions at D10 and H840, or other substitutions within the nuclease domains of Cas9 (e.g., substitutions in the HNH nuclease subdomain and/or the RuvC1 subdomain).

[0276] Additional suitable nuclease-inactive dCas9 domains can be apparent to those of skill in the art based on this disclosure and knowledge in the field, and are within the scope of this disclosure. Such additional exemplary suitable nuclease-inactive Cas9 domains include, but are not limited to, D10A/H840A, D10A/D839A/H840A, and D10A/D839A/H840A/N863A mutant domains (See, e.g., Prashant et al., CAS9 transcriptional activators for target specificity screening and paired nickases for cooperative genome engineering. Nature Biotechnology. 2013; 31(9): 833-838, the entire contents of which are incorporated herein by reference). In some embodiments, the dCas9 domain comprises an amino acid sequence that is at least 60%, at least 65%, at least 70%, at least 75%, at least 80%, at least 85%, at least 90%, at least 95%, at least 96%, at least 97%, at least 98%, at least 99%, or at least 99.5% identical to any one of the dCas9 domains provided herein. In some embodiments, the Cas9 domain comprises an amino acid sequences that has 1, 2, 3, 4, 5, 6, 7, 8, 9, 10, 11, 12, 13, 14, 15, 16, 17, 18, 19, 20, 21, 22, 21, 24, 25, 26, 27, 28, 29, 30, 31, 32, 33, 34, 35, 36, 37, 38, 39, 40, 41, 42, 43, 44, 45, 46, 47, 48, 49, 50 or more or more mutations compared to any one of the amino acid sequences set forth herein. In some embodiments, the Cas9 domain comprises an amino acid sequence that has at least 10, at least 15, at least 20, at least 30, at least 40, at least 50, at least 60, at least 70, at least 80, at least 90, at least 100, at least 150, at least 200, at least 250, at least 300, at least 350, at least 400, at least 500, at least 600, at least 700, at least 800, at least 900, at least 1000, at least 1100, or at least 1200 identical contiguous amino acid residues as compared to any one of the amino acid sequences set forth herein.

[0277] Non-limiting examples of a polynucleotide programmable nucleotide binding domain which can be incorporated into a base editor include a CRISPR protein-derived domain, a restriction nuclease, a meganuclease, TAL nuclease (TALEN), and a zinc finger nuclease (ZFN). In some embodiments, a base editor comprises a polynucleotide programmable nucleotide binding domain comprising a natural or modified protein or portion thereof which via a bound guide nucleic acid is capable of binding to a nucleic acid sequence during CRISPR (i.e., Clustered Regularly Interspaced Short Palindromic Repeats)-mediated modification of a nucleic acid. Such a protein is referred to herein as a “CRISPR protein.” Accordingly, disclosed herein is a base editor comprising a polynucleotide programmable nucleotide binding domain comprising all or a portion of a CRISPR protein (i.e. a base editor comprising as a domain all or a portion of a CRISPR protein, also referred to as a “CRISPR protein-derived domain” of the base editor). A CRISPR protein-derived domain incorporated into a base editor can be modified compared to a wild-type or natural version of the CRISPR protein. For example, as described below a CRISPR protein-derived domain can comprise one or more mutations, insertions, deletions, rearrangements and/or recombinations relative to a wild-type or natural version of the CRISPR protein.

[0278] In some embodiments, a CRISPR protein-derived domain incorporated into a base editor is an endonuclease (e.g., deoxyribonuclease or ribonuclease) capable of binding a target polynucleotide when in conjunction with a bound guide nucleic acid. In some embodiments, a CRISPR protein-derived domain incorporated into a base editor is a nickase capable of binding a target polynucleotide when in conjunction with a bound guide nucleic acid. In some embodiments, a CRISPR protein-derived domain incorporated into a base editor is a catalytically dead domain capable of binding a target polynucleotide when in conjunction with a bound guide nucleic acid. In some embodiments, a target polynucleotide bound by a CRISPR protein derived domain of a base editor is DNA. In some embodiments, a target polynucleotide bound by a CRISPR protein-derived domain of a base editor is RNA.

[0279] In some embodiments, a CRISPR protein-derived domain of a base editor can include all or a portion of Cas9 from Corynebacterium ulcerans (NCBI Refs: NC_015683.1, NC_017317.1); Corynebacterium diphtheria (NCBI Refs: NC_016782.1, NC_016786.1); Spiroplasma syrphidicola (NCBI Ref: NC_021284.1); Prevotella intermedia (NCBI Ref: NC_017861.1); Spiroplasma taiwanense (NCBI Ref: NC_021846.1); Streptococcus iniae (NCBI Ref: NC_021314.1); Belliella baltica (NCBI Ref: NC_018010.1); Psychroflexus torquis (NCBI Ref: NC_018721.1); Streptococcus thermophilus (NCBI Ref: YP_820832.1); Listeria innocua (NCBI Ref: NP_472073.1); Campylobacter jejuni (NCBI Ref: YP_002344900.1); Neisseria meningitidis (NCBI Ref: YP_002342100.1), Streptococcus pyogenes, or Staphylococcus aureus.

[0280] In some embodiments, a Cas9-derived domain of a base editor is a Cas9 domain from Staphylococcus aureus (SaCas9). In some embodiments, the SaCas9 domain is a nuclease active SaCas9, a nuclease inactive SaCas9 (SaCas9d), or a SaCas9 nickase (SaCas9n). In some embodiments, the SaCas9 domain comprises a N579X mutation. In some embodiments, the SaCas9 domain comprises a N579A mutation. In some embodiments, the SaCas9 domain, the SaCas9d domain, or the SaCas9n domain can bind to a nucleic acid sequence having a non-canonical PAM. In some embodiments, the SaCas9 domain, the SaCas9d domain, or the SaCas9n domain can bind to a nucleic acid sequence having a NNGRRT PAM sequence. In some embodiments, the SaCas9 domain comprises one or more of a E781X, a N967X, and a R1014X mutation.

[0281] A base editor can comprise a domain derived from all or a portion of a Cas9 that is a high fidelity Cas9. In some embodiments, high fidelity Cas9 domains of a base editor are engineered Cas9 domains comprising one or more mutations that decrease electrostatic interactions between the Cas9 domain and the sugar-phosphate backbone of a DNA, relative to a corresponding wild-type Cas9 domain. High fidelity Cas9 domains that have decreased electrostatic interactions with the sugar-phosphate backbone of DNA can have less off-target effects. In some embodiments, the Cas9 domain (e.g., a wild type Cas9 domain) comprises one or more mutations that decrease the association between the Cas9 domain and the sugar-phosphate backbone of a DNA. In some embodiments, a Cas9 domain comprises one or more mutations that decreases the association between the Cas9 domain and the sugar-phosphate backbone of DNA by at least 1%, at least 2%, at least 3%, at least 4%, at least 5%, at least 10%, at least 15%, at least 20%, at least 25%, at least 30%, at least 35%, at least 40%, at least 45%, at least 50%, at least 55%, at least 60%, at least 65%, at least 70%, or more.

[0282] In some embodiments, the modified Cas9 is a high fidelity Cas9 enzyme. In some embodiments, the high fidelity Cas9 enzyme is SpCas9 (K855A), eSpCas9(1.1), SpCas9-HF1, or hyper accurate Cas9 variant (HypaCas9). The modified Cas9 eSpCas9(1.1) contains alanine substitutions that weaken the interactions between the HNH/RuvC groove and the non-target

[0283] DNA strand, preventing strand separation and cutting at off-target sites. Similarly, SpCas9-HF1 lowers off-target editing through alanine substitutions that disrupt Cas9's interactions with the DNA phosphate backbone. HypaCas9 contains mutations (SpCas9 N692A/M694A/Q695A/H698A) in the REC3 domain that increase Cas9 proofreading and target discrimination. All three high fidelity enzymes generate less off-target editing than wildtype Cas9. An exemplary high fidelity Cas9 is provided below.

[0284] High Fidelity Cas9 domain mutations relative to Cas9 are shown in bold and underlines

MDKKYSIGLAIGTNSVGWAVITDEYKVPSKKFKVLGNTDRHSIKKNLIGAL
LFDSGETAEATRLKRTARRRYTRRKNRICYLQEIFSNEMAKVDDSFFHRLE
ESFLVEEDKKHERHPIFGNIVDEVAYHEKYPTIYHLRKKLVDSTDKADLRL
IYLALAHMIKFRGHFLIEGDLNPDNSDVDKLFIQLVQTYNQLFEENPINAS
GVDAKAILSARLSKSRRLENLIAQLPGEKKNGLFGNLIALSLGLTPNFKSN
FDLAEDAKLQLSKDTYDDDLDNLLAQIGDQYADLFLAAKNLSDAILLSDIL
RVNTEITKAPLSASMIKRYDEHHQDLTLLKALVRQQLPEKYKEIFFDQSKN
GYAGYIDGGASQEEFYKFIKPILEKMDGTEELLVKLNREDLLRKQRTFDNG
SIPHQIHLGELHAILRRQEDFYPFLKDNREKIEKILTFRIPYYVGPLARGN
SRFAWMTRKSEETITPWNFEEVVDKGASAQSFIERMTAFDKNLPNEKVLPK
HSLLYEYFTVYNELTKVKYVTEGMRKPAFLSGEQKKAIVDLLFKTNRKVTV
KQLKEDYFKKIECFDSVEISGVEDRFNASLGTYHDLLKIIKDKDFLDNEEN
EDILEDIVLTLTLFEDREMIEERLKTYAHLFDDKVMKQLKRRRYTGWGALS
RKLINGIRDKQSGKTILDFLKSDGFANRNFMALIHDDSLTFKEDIQKAQVS
GQGDSLHEHIANLAGSPAIKKGILQTVKVVDELVKVMGRHKPENIVIEMAR
ENQTTQKGQKNSRERMKRIEEGIKELGSQILKEHPVENTQLQNEKLYLYYL
QNGRDMYVDQELDINRLSDYDVDHIVPQSFLKDDSIDNKVLTRSDKNRGKS
DNVPSEEVVKKMKNYWRQLLNAKLITQRKFDNLTKAERGGLSELDKAGFIK
RQLVETRAITKHVAQILDSRMNTKYDENDKLIREVKVITLKSKLVSDFRKD
FQFYKVREINNYHHAHDAYLNAVVGTALIKKYPKLESEFVYGDYKVYDVRK
MIAKSEQEIGKATAKYFFYSNIMNFFKTEITLANGEIRKRPLIETNGETGE
IVWDKGRDFATVRKVLSMPQVNIVKKTEVQTGGFSKESILPKRNSDKLIAR
KKDWDPKKYGGFDSPTVAYSVLVVAKVEKGKSKKLKSVKELLGITIMERSS
FEKNPIDFLEAKGYKEVKKDLIIKLPKYSLFELENGRKRMLASAGELQKGN
ELALPSKYVNFLYLASHYEKLKGSPEDNEQKQLFVEQHKHYLDEIIEQISE
FSKRVILADANLDKVLSAYNKHRDKPIREQAENIIHLFTLTNLGAPAAFKY
FDTTIDRKRYTSTKEVLDATLIHQSITGLYETRIDLSQLGGD

### Guide Polynucleotides

[0285] In an embodiment, the guide polynucleotide is a guide RNA. As used herein, the term “guide RNA (gRNA)” and its grammatical equivalents can refer to an RNA which can be specific for a target DNA and can form a complex with Cas protein. An RNA/Cas complex can assist in “guiding” Cas protein to a target DNA. Cas9/crRNA/tracrRNA endonucleolytically cleaves linear or circular dsDNA target complementary to the spacer. The target strand not complementary to crRNA is first cut endonucleolytically, then trimmed 3′-5′ exonucleolytically. In nature, DNA-binding and cleavage typically requires protein and both RNAs. However, single guide RNAs (“sgRNA” or simply “gRNA”) can be engineered so as to incorporate aspects of both the crRNA and tracrRNA into a single RNA species. See, e.g., Jinek M. et al., Science 337:816-821(2012), the entire contents of which is hereby incorporated by reference. Cas9 recognizes a short motif in the CRISPR repeat sequences (the PAM or protospacer adjacent motif) to help distinguish self versus non-self. Cas9 nuclease sequences and structures are well known to those of skill in the art (see e.g., “Complete genome sequence of an M1 strain of Streptococcus pyogenes.” Ferretti, J. J. et al., Natl. Acad. Sci. U.S.A. 98:4658-4663(2001); “CRISPR RNA maturation by trans-encoded small RNA and host factor RNase III.” Deltcheva E. et al., Nature 471:602-607(2011); and “Programmable dual-RNA-guided DNA endonuclease in adaptive bacterial immunity.” Jinek M. et al, Science 337:816-821(2012), the entire contents of each of which are incorporated herein by reference). Cas9 orthologs have been described in various species, including, but not limited to, S. pyogenes and S. thermophilus. Additional suitable Cas9 nucleases and sequences can be apparent to those of skill in the art based on this disclosure, and such Cas9 nucleases and sequences include Cas9 sequences from the organisms and loci disclosed in Chylinski, Rhun, and Charpentier, “The tracrRNA and Cas9 families of type II CRISPR-Cas immunity systems” (2013) RNA Biology 10:5, 726-737; the entire contents of which are incorporated herein by reference. In some embodiments, a Cas9 nuclease has an inactive (e.g., an inactivated) DNA cleavage domain, that is, the Cas9 is a nickase.

[0286] In some embodiments, the guide polynucleotide is at least one single guide RNA (“sgRNA” or “gRNA”). In some embodiments, the guide polynucleotide is at least one tracrRNA. In some embodiments, the guide polynucleotide does not require PAM sequence to guide the polynucleotide-programmable DNA-binding domain (e.g., Cas9 or Cpf1) to the target nucleotide sequence.

[0287] The polynucleotide programmable nucleotide binding domain (e.g., a CRISPR-derived domain) of the base editors disclosed herein can recognize a target polynucleotide sequence by associating with a guide polynucleotide. A guide polynucleotide (e.g., gRNA) is typically single-stranded and can be programmed to site-specifically bind (i.e., via complementary base pairing) to a target sequence of a polynucleotide, thereby directing a base editor that is in conjunction with the guide nucleic acid to the target sequence. A guide polynucleotide can be DNA. A guide polynucleotide can be RNA. As will be appreciated by one having skill in the art, in a guide polynucleotide sequence uracil (U) replaces thymine (T) in the sequence. In some embodiments, the guide polynucleotide comprises natural nucleotides (e.g., adenosine). In some embodiments, the guide polynucleotide comprises non-natural (or unnatural) nucleotides (e.g., peptide nucleic acid or nucleotide analogs). In some embodiments, the targeting region of a guide nucleic acid sequence can be at least 15, 16, 17, 18, 19, 20, 21, 22, 23, 24, 25, 26, 27, 28, 29, or 30 nucleotides in length. A targeting region of a guide nucleic acid can be between 10-30 nucleotides in length, or between 15-25 nucleotides in length, or between 15-20 nucleotides in length. In some embodiments, a guide polynucleotide may be truncated by 1, 2, 3, 4, etc. nucleotides, particularly at the 5′ end. By way of nonlimiting example, a guide polynucleotide of 20 nucleotides in length may be truncated by 1, 2, 3, 4, etc. nucleotides, particularly at the 5′ end.

[0288] In some embodiments, a guide polynucleotide comprises two or more individual polynucleotides, which can interact with one another via for example complementary base pairing (e.g., a dual guide polynucleotide). For example, a guide polynucleotide can comprise a CRISPR RNA (crRNA) and a trans-activating CRISPR RNA (tracrRNA). For example, a guide polynucleotide can comprise one or more trans-activating CRISPR RNA (tracrRNA).

[0289] In type II CRISPR systems, targeting of a nucleic acid by a CRISPR protein (e.g., Cas9) typically requires complementary base pairing between a first RNA molecule (crRNA) comprising a sequence that recognizes the target sequence and a second RNA molecule (trRNA) comprising repeat sequences which forms a scaffold region that stabilizes the guide RNA-CRISPR protein complex. Such dual guide RNA systems can be employed as a guide polynucleotide to direct the base editors disclosed herein to a target polynucleotide sequence.

[0290] In some embodiments, the base editor provided herein utilizes a single guide polynucleotide (e.g., sgRNA). In some embodiments, the base editor provided herein utilizes a dual guide polynucleotide (e.g., dual gRNAs). In some embodiments, the base editor provided herein utilizes one or more guide polynucleotide (e.g., multiple gRNA). In some embodiments, a single guide polynucleotide is utilized for different base editors described herein. For example, a single guide polynucleotide can be utilized for an adenosine base editor.

[0291] In other embodiments, a guide polynucleotide can comprise both the polynucleotide targeting portion of the nucleic acid and the scaffold portion of the nucleic acid in a single molecule (i.e., a single-molecule guide nucleic acid). For example, a single-molecule guide polynucleotide can be a single guide RNA (sgRNA or gRNA). Herein the term guide polynucleotide sequence contemplates any single, dual or multi-molecule nucleic acid capable of interacting with and directing a base editor to a target polynucleotide sequence.

[0292] Typically, a guide polynucleotide (e.g., crRNA/trRNA complex or a gRNA) comprises a “polynucleotide-targeting segment” that includes a sequence capable of recognizing and binding to a target polynucleotide sequence, and a “protein-binding segment” that stabilizes the guide polynucleotide within a polynucleotide programmable nucleotide binding domain component of a base editor. In some embodiments, the polynucleotide targeting segment of the guide polynucleotide recognizes and binds to a DNA polynucleotide, thereby facilitating the editing of a base in DNA. In other embodiments, the polynucleotide targeting segment of the guide polynucleotide recognizes and binds to an RNA polynucleotide, thereby facilitating the editing of a base in RNA. Herein a “segment” refers to a section or region of a molecule, e.g., a contiguous stretch of nucleotides in the guide polynucleotide. A segment can also refer to a region/section of a complex such that a segment can comprise regions of more than one molecule. For example, where a guide polynucleotide comprises multiple nucleic acid molecules, the protein-binding segment of can include all or a portion of multiple separate molecules that are for instance hybridized along a region of complementarity. In some embodiments, a protein-binding segment of a DNA-targeting RNA that comprises two separate molecules can comprise (i) base pairs 40-75 of a first RNA molecule that is 100 base pairs in length; and (ii) base pairs 10-25 of a second RNA molecule that is 50 base pairs in length. The definition of “segment,” unless otherwise specifically defined in a particular context, is not limited to a specific number of total base pairs, is not limited to any particular number of base pairs from a given RNA molecule, is not limited to a particular number of separate molecules within a complex, and can include regions of RNA molecules that are of any total length and can include regions with complementarity to other molecules.

[0293] A guide RNA or a guide polynucleotide can comprise two or more RNAs, e.g., CRISPR RNA (crRNA) and transactivating crRNA (tracrRNA). A guide RNA or a guide polynucleotide can sometimes comprise a single-chain RNA, or single guide RNA (sgRNA) formed by fusion of a portion (e.g., a functional portion) of crRNA and tracrRNA. A guide RNA or a guide polynucleotide can also be a dual RNA comprising a crRNA and a tracrRNA. Furthermore, a crRNA can hybridize with a target DNA.

[0294] As discussed above, a guide RNA or a guide polynucleotide can be an expression product. For example, a DNA that encodes a guide RNA can be a vector comprising a sequence coding for the guide RNA. A guide RNA or a guide polynucleotide can be transferred into a cell by transfecting the cell with an isolated guide RNA or plasmid DNA comprising a sequence coding for the guide RNA and a promoter. A guide RNA or a guide polynucleotide can also be transferred into a cell in other way, such as using virus-mediated gene delivery.

[0295] A guide RNA or a guide polynucleotide can be isolated. For example, a guide RNA can be transfected in the form of an isolated RNA into a cell or organism. A guide RNA can be prepared by in vitro transcription using any in vitro transcription system known in the art. A guide RNA can be transferred to a cell in the form of isolated RNA rather than in the form of plasmid comprising encoding sequence for a guide RNA.

[0296] A guide RNA or a guide polynucleotide can comprise three regions: a first region at the 5′ end that can be complementary to a target site in a chromosomal sequence, a second internal region that can form a stem loop structure, and a third 3′ region that can be single-stranded. A first region of each guide RNA can also be different such that each guide RNA guides a fusion protein to a specific target site. Further, second and third regions of each guide RNA can be identical in all guide RNAs.

[0297] A first region of a guide RNA or a guide polynucleotide can be complementary to sequence at a target site in a chromosomal sequence such that the first region of the guide RNA can base pair with the target site. In some embodiments, a first region of a guide RNA can comprise from or from about 10 nucleotides to 25 nucleotides (i.e., from 10 nucleotides to nucleotides; or from about 10 nucleotides to about 25 nucleotides; or from 10 nucleotides to about 25 nucleotides; or from about 10 nucleotides to 25 nucleotides) or more. For example, a region of base pairing between a first region of a guide RNA and a target site in a chromosomal sequence can be or can be about 10, 11, 12, 13, 14, 15, 16, 17, 18, 19, 20, 22, 23, 24, 25, or more nucleotides in length. In some embodiments, a first region of a guide RNA can be or can be about 19, 20, or 21 nucleotides in length.

[0298] A guide RNA or a guide polynucleotide can also comprise a second region that forms a secondary structure. For example, a secondary structure formed by a guide RNA can comprise a stem (or hairpin) and a loop. A length of a loop and a stem can vary. For example, a loop can range from or from about 3 to 10 nucleotides in length, and a stem can range from or from about 6 to 20 base pairs in length. A stem can comprise one or more bulges of 1 to 10 or about 10 nucleotides. The overall length of a second region can range from or from about 16 to 60 nucleotides in length. For example, a loop can be or can be about 4 nucleotides in length and a stem can be or can be about 12 base pairs.

[0299] A guide RNA or a guide polynucleotide can also comprise a third region at the 3′ end that can be essentially single-stranded. For example, a third region is sometimes not complementarity to any chromosomal sequence in a cell of interest and is sometimes not complementarity to the rest of a guide RNA. Further, the length of a third region can vary. A third region can be more than or more than about 4 nucleotides in length. For example, the length of a third region can range from or from about 5 to 60 nucleotides in length.

[0300] A guide RNA or a guide polynucleotide can target any exon or intron of a gene target. In some embodiments, a guide can target exon 1 or 2 of a gene; in other embodiments, a guide can target exon 3 or 4 of a gene. A composition can comprise multiple guide RNAs that all target the same exon, or in some embodiments, multiple guide RNAs that can target different exons. An exon and an intron of a gene can be targeted.

[0301] A guide RNA or a guide polynucleotide can target a nucleic acid sequence of about 20 nucleotides. A target nucleic acid can be less than about 20 nucleotides. A target nucleic acid can be at least or at least about 5, 10, 15, 16, 17, 18, 19, 20, 21, 22, 23, 24, 25, 30, or anywhere between 1-100 nucleotides in length. A target nucleic acid can be at most or at most about 5, 10, 15, 16, 17, 18, 19, 20, 21, 22, 23, 24, 25, 30, 40, 50, or anywhere between 1-100 nucleotides in length. A target nucleic acid sequence can be or can be about 20 bases immediately 5′ of the first nucleotide of the PAM. A guide RNA can target a nucleic acid sequence. A target nucleic acid can be at least or at least about 1-10, 1-20, 1-30, 1-40, 1-50, 1-60, 1-70, 1-80, 1-90, or 1-100 nucleotides.

[0302] A guide polynucleotide, for example, a guide RNA, can refer to a nucleic acid that can hybridize to another nucleic acid, for example, the target nucleic acid or protospacer in a genome of a cell. A guide polynucleotide can be RNA. A guide polynucleotide can be DNA. The guide polynucleotide can be programmed or designed to bind to a sequence of nucleic acid site-specifically. A guide polynucleotide can comprise a polynucleotide chain and can be called a single guide polynucleotide. A guide polynucleotide can comprise two polynucleotide chains and can be called a double guide polynucleotide. A guide RNA can be introduced into a cell or embryo as an RNA molecule. For example, a RNA molecule can be transcribed in vitro and/or can be chemically synthesized. An RNA can be transcribed from a synthetic DNA molecule, e.g., a gBlocks® gene fragment. A guide RNA can then be introduced into a cell or embryo as an RNA molecule. A guide RNA can also be introduced into a cell or embryo in the form of a non-RNA nucleic acid molecule, e.g., a DNA molecule. For example, a DNA encoding a guide RNA can be operably linked to promoter control sequence for expression of the guide RNA in a cell or embryo of interest. A RNA coding sequence can be operably linked to a promoter sequence that is recognized by RNA polymerase III (Pol III). Plasmid vectors that can be used to express guide RNA include, but are not limited to, px330 vectors and px333 vectors. In some embodiments, a plasmid vector (e.g., px333 vector) can comprise at least two guide RNA-encoding DNA sequences.

[0303] Methods for selecting, designing, and validating guide polynucleotides, e.g., guide RNAs and targeting sequences, are described herein and known to those skilled in the art. For example, to minimize the impact of potential substrate promiscuity of a deaminase domain in the nucleobase editor system (e.g., an AID domain), the number of residues that could unintentionally be targeted for deamination (e.g., off-target C residues that could potentially reside on ssDNA within the target nucleic acid locus) may be minimized. In addition, software tools can be used to optimize the gRNAs corresponding to a target nucleic acid sequence, e.g., to minimize total off-target activity across the genome. For example, for each possible targeting domain choice using S. pyogenes Cas9, all off-target sequences (preceding selected PAMs, e.g., NAG or NGG) may be identified across the genome that contain up to certain number (e.g., 1, 2, 3, 4, 5, 6, 7, 8, 9, or 10) of mismatched base-pairs. First regions of gRNAs complementary to a target site can be identified, and all first regions (e.g., crRNAs) can be ranked according to its total predicted off-target score; the top-ranked targeting domains represent those that are likely to have the greatest on-target and the least off-target activity. Candidate targeting gRNAs can be functionally evaluated by using methods known in the art and/or as set forth herein.

[0304] As a non-limiting example, target DNA hybridizing sequences in crRNAs of a guide RNA for use with Cas9s may be identified using a DNA sequence searching algorithm. gRNA design may be carried out using custom gRNA design software based on the public tool cas-offinder as described in Bae S., Park J., & Kim J.-S. Cas-OFFinder: A fast and versatile algorithm that searches for potential off-target sites of Cas9 RNA-guided endonucleases, Bioinformatics 30, 1473-1475 (2014). This software scores guides after calculating their genome-wide off-target propensity. Typically matches ranging from perfect matches to 7 mismatches are considered for guides ranging in length from 17 to 24. Once the off-target sites are computationally-determined, an aggregate score is calculated for each guide and summarized in a tabular output using a web-interface. In addition to identifying potential target sites adjacent to PAM sequences, the software also identifies all PAM adjacent sequences that differ by 1, 2, 3, or more than 3 nucleotides from the selected target sites. Genomic DNA sequences for a target nucleic acid sequence, e.g., a target gene may be obtained and repeat elements may be screened using publicly available tools, for example, the RepeatMasker program. RepeatMasker searches input DNA sequences for repeated elements and regions of low complexity. The output is a detailed annotation of the repeats present in a given query sequence.

[0305] Following identification, first regions of guide RNAs, e.g., crRNAs, may be ranked into tiers based on their distance to the target site, their orthogonality and presence of 5′ nucleotides for close matches with relevant PAM sequences (for example, a 5′ G based on identification of close matches in the human genome containing a relevant PAM e.g., NGG PAM for S. pyogenes, NNGRRT or NNGRRV PAM for S. aureus). As used herein, orthogonality refers to the number of sequences in the human genome that contain a minimum number of mismatches to the target sequence. A “high level of orthogonality” or “good orthogonality” may, for example, refer to 20-mer targeting domains that have no identical sequences in the human genome besides the intended target, nor any sequences that contain one or two mismatches in the target sequence. Targeting domains with good orthogonality may be selected to minimize off-target DNA cleavage.

[0306] In some embodiments, a reporter system may be used for detecting base-editing activity and testing candidate guide polynucleotides. In some embodiments, a reporter system may comprise a reporter gene based assay where base editing activity leads to expression of the reporter gene. For example, a reporter system may include a reporter gene comprising a deactivated start codon, e.g., a mutation on the template strand from 3′-TAC-S′ to 3′-CAC-S′. Upon successful deamination of the target C, the corresponding mRNA will be transcribed as 5′-AUG-3′ instead of 5′-GUG-3′, enabling the translation of the reporter gene. Suitable reporter genes will be apparent to those of skill in the art. Non-limiting examples of reporter genes include gene encoding green fluorescence protein (GFP), red fluorescence protein (RFP), luciferase, secreted alkaline phosphatase (SEAP), or any other gene whose expression are detectable and apparent to those skilled in the art. The reporter system can be used to test many different gRNAs, e.g., in order to determine which nucleotide residue(s) with respect to the target DNA sequence the respective deaminase will target. sgRNAs that target non-template strand nucleotide residues can also be tested in order to assess off-target effects of a specific base editing protein, e.g., a Cas9 deaminase fusion protein. In some embodiments, such gRNAs can be designed so that the mutated start codon will not be base-paired with the gRNA. The guide polynucleotides can comprise standard nucleotides, modified nucleotides (e.g., pseudouridine), nucleotide isomers, and/or nucleotide analogs. In some embodiments, the guide polynucleotide can comprise at least one detectable label. The detectable label can be a fluorophore (e.g., FAM, TMR, Cy3, Cy5, Texas Red, Oregon Green, Alexa Fluors, Halo tags, or any other suitable fluorescent dye), a detection tag (e.g., biotin, digoxigenin, and the like), quantum dots, or gold particles.

[0307] The guide polynucleotides can be synthesized chemically and/or enzymatically. For example, the guide RNA can be synthesized using standard phosphoramidite-based solid-phase synthesis methods. Alternatively, the guide RNA can be synthesized in vitro by operably linking DNA encoding the guide RNA to a promoter control sequence that is recognized by a phage RNA polymerase. Examples of suitable phage promoter sequences include T7, T3, SP6 promoter sequences, or variations thereof. In embodiments in which the guide RNA comprises two separate molecules (e.g., crRNA and tracrRNA), the crRNA can be chemically synthesized and the tracrRNA can be enzymatically synthesized.

[0308] In some embodiments, a base editor system may comprise multiple guide polynucleotides, e.g., gRNAs. For example, the gRNAs may target the base editor to one or more target loci (e.g., at least one (1) gRNA, at least 2 gRNA, at least 5 gRNA, at least 10 gRNA, at least 20 gRNA, at least 30 g RNA, or at least 50 gRNA). In some embodiments, multiple gRNA sequences can be tandemly arranged iand are preferably separated by a direct repeat.

[0309] A DNA sequence encoding a guide RNA or a guide polynucleotide can also be part of a vector. In some embodiments, a vector comprises additional expression control sequences (e.g., enhancer sequences, Kozak sequences, polyadenylation sequences, transcriptional termination sequences, etc.), selectable marker sequences (e.g., GFP or antibiotic resistance genes such as puromycin), origins of replication, and the like. A DNA molecule encoding a guide RNA or guide polynucleotide can also be linear or circular.

[0310] In some embodiments, one or more components of a base editor system may be encoded by DNA sequences. Such DNA sequences may be introduced into an expression system, e.g., a cell, together or separately. For example, DNA sequences encoding a polynucleotide programmable nucleotide binding domain and a guide RNA may be introduced into a cell, each DNA sequence can be part of a separate molecule (e.g., one vector containing the polynucleotide programmable nucleotide binding domain coding sequence and a second vector containing the guide RNA coding sequence) or both can be part of a same molecule (e.g., one vector containing coding (and regulatory) sequence for both the polynucleotide programmable nucleotide binding domain and the guide RNA).

[0311] A guide polynucleotide can comprise one or more modifications to provide a nucleic acid with a new or enhanced feature. A guide polynucleotide can comprise a nucleic acid affinity tag. A guide polynucleotide can comprise synthetic nucleotide, synthetic nucleotide analog, nucleotide derivatives, and/or modified nucleotides.

[0312] In some embodiments, a gRNA or a guide polynucleotide can comprise modifications. A modification can be made at any location of a gRNA or a guide polynucleotide. More than one modification can be made to a single gRNA or guide polynucleotide. A gRNA or a guide polynucleotide can undergo quality control after a modification. In some embodiments, quality control can include PAGE, HPLC, MS, or any combination thereof.

[0313] A modification of a gRNA or a guide polynucleotide can be a substitution, insertion, deletion, chemical modification, physical modification, stabilization, purification, or any combination thereof.

[0314] A gRNA or a guide polynucleotide can also be modified by 5′adenylate, 5′guanosine-triphosphate cap, 5′N₇-Methylguanosine-triphosphate cap, 5′triphosphate cap, 3′phosphate, 3′thiophosphate, 5′phosphate, 5′thiophosphate, Cis-Syn thymidine dimer, trimers, C12 spacer, C3 spacer, C6 spacer, dSpacer, PC spacer, rSpacer, Spacer 18, Spacer 9,3′-3′ modifications, 5′-5′ modifications, abasic, acridine, azobenzene, biotin, biotin BB, biotin TEG, cholesteryl TEG, desthiobiotin TEG, DNP TEG, DNP-X, DOTA, dT-Biotin, dual biotin, PC biotin, psoralen C2, psoralen C6, TINA, 3′DABCYL, black hole quencher 1, black hole quencer 2, DABCYL SE, dT-DABCYL, IRDye QC-1, QSY-21, QSY-35, QSY-7, QSY-9, carboxyl linker, thiol linkers, 2′-deoxyribonucleoside analog purine, 2′-deoxyribonucleoside analog pyrimidine, ribonucleoside analog, 2′-O-methyl ribonucleoside analog, sugar modified analogs, wobble/universal bases, fluorescent dye label, 2′-fluoro RNA, 2′-O-methyl RNA, methylphosphonate, phosphodiester DNA, phosphodiester RNA, phosphothioate DNA, phosphorothioate RNA, UNA, pseudouridine-5′-triphosphate, 5′-methylcytidine-5′-triphosphate, or any combination thereof.

[0315] In some embodiments, a modification is permanent. In other embodiments, a modification is transient. In some embodiments, multiple modifications are made to a gRNA or guide polynucleotide. A gRNA or guide polynucleotide modification can alter physiochemical properties of a nucleotide, such as their conformation, polarity, hydrophobicity, chemical reactivity, base-pairing interactions, or any combination thereof.

[0316] A modification can also be a phosphorothioate substitute. In some embodiments, a natural phosphodiester bond can be susceptible to rapid degradation by cellular nucleases and; a modification of internucleotide linkage using phosphorothioate (PS) bond substitutes can be more stable towards hydrolysis by cellular degradation. A modification can increase stability in a gRNA or a guide polynucleotide. A modification can also enhance biological activity. In some embodiments, a phosphorothioate enhanced RNA gRNA can inhibit RNase A, RNase Ti, calf serum nucleases, or any combinations thereof. These properties can allow the use of PS-RNA gRNAs to be used in applications where exposure to nucleases is of high probability in vivo or in vitro. For example, phosphorothioate (PS) bonds can be introduced between the 13-5 nucleotides at the 5′- or 3′-end of a gRNA which can inhibit exonuclease degradation. In some embodiments, phosphorothioate bonds can be added throughout an entire gRNA to reduce attack by endonucleases.

### Protospacer Adjacent Motif

[0317] The term “protospacer adjacent motif (PAM)” or PAM-like motif refers to a 2-6 base pair DNA sequence immediately following the DNA sequence targeted by the Cas9 nuclease in the CRISPR bacterial adaptive immune system. In some embodiments, the PAM can be a 5′ PAM (i.e., located upstream of the 5′ end of the protospacer). In other embodiments, the PAM can be a 3′ PAM (i.e., located downstream of the 5′ end of the protospacer). The PAM sequence is essential for target binding, but the exact sequence depends on a type of Cas protein. The PAM sequence can be any PAM sequence known in the art. Suitable PAM sequences include, but are not limited to, NGG, NGA, NGC, NGN, NGT, NGTT, NGCG, NGAG, NGAN, NGNG, NGCN, NGCG, NGTN, NNGRRT, NNNRRT, NNGRR(N), TTTV, TYCV, TYCV, TATV, NNNNGATT, NNAGAAW, or NAAAAC. Y is a pyrimidine; N is any nucleotide base; W is A or T.

[0318] A base editor provided herein can comprise a CRISPR protein-derived domain that is capable of binding a nucleotide sequence that contains a canonical or non-canonical protospacer adjacent motif (PAM) sequence. A PAM site is a nucleotide sequence in proximity to a target polynucleotide sequence. Some aspects of the disclosure provide for base editors comprising all or a portion of CRISPR proteins that have different PAM specificities.

[0319] For example, typically Cas9 proteins, such as Cas9 from S. pyogenes (spCas9), require a canonical NGG PAM sequence to bind a particular nucleic acid region, where the “N” in “NGG” is adenine (A), thymine (T), guanine (G), or cytosine (C), and the G is guanine. A PAM can be CRISPR protein-specific and can be different between different base editors comprising different CRISPR protein-derived domains. A PAM can be 5′ or 3′ of a target sequence. A PAM can be upstream or downstream of a target sequence. A PAM can be 1, 2, 3, 4, 5, 6, 7, 8, 9, 10 or more nucleotides in length. Often, a PAM is between 2-6 nucleotides in length.

[0320] In some embodiments, the PAM is an “NRN” PAM where the “N” in “NRN” is adenine (A), thymine (T), guanine (G), or cytosine (C), and the R is adenine (A) or guanine (G); or the PAM is an “NYN” PAM, wherein the “N” in NYN is is adenine (A), thymine (T), guanine (G), or cytosine (C), and the Y is cytidine (C) or thymine (T), for example, as described in R. T. Walton et al., 2020, Science, 10.1126/science.aba8853 (2020), the entire contents of which are incorporated herein by reference.

[0321] Several PAM variants are described in Table 2 below.

TABLE 2
Cas9 proteins and corresponding PAM sequences

| Variant | PAM |
|---|---|
| spCas9 | NGG |
| spCas9-VRQR | NGA |
| spCas9-VRER | NGCG |
| xCas9 (sp) | NGN |
| saCas9 | NNGRRT |
| saCas9-KKH | NNNRRT |
| spCas9-MQKSER | NGCG |
| spCas9-MQKSER | NGCN |
| spCas9-LRKIQK | NGTN |
| spCas9-LRVSQK | NGTN |
| spCas9-LRVSQL | NGTN |
| SpyMacCas9 | NAA |
| Cpf1 | 5′ (TTTV) |

[0322] In some embodiments, the PAM is NGC. In some embodiments, the NGC PAM is recognized by a Cas9 variant. In some embodiments, the NGC PAM variant includes one or more amino acid substitutions selected from D1135M, 51136Q, G1218K, E1219F, A1322R, D1332A, R1335E, and T1337R (collectively termed “MQKFRAER”).

[0323] In some embodiments, the PAM is NGT. In some embodiments, the NGT PAM is recognized by a Cas9 variant. In some embodiments, the NGT PAM variant is generated through targeted mutations at one or more residues 1335, 1337, 1135, 1136, 1218, and/or 1219. In some embodiments, the NGT PAM variant is created through targeted mutations at one or more residues 1219, 1335, 1337, 1218. In some embodiments, the NGT PAM variant is created through targeted mutations at one or more residues 1135, 1136, 1218, 1219, and 1335. In some embodiments, the NGT PAM variant is selected from the set of targeted mutations provided in Table 3 and Table 4 below.

[0324] In some embodiments, the NGT PAM variant is selected from variant 5, 7, 28, 31, or 36 in Tables 3 and 4. In some embodiments, the variants have improved NGT PAM recognition.

[0325] In some embodiments, the NGT PAM variants have mutations at residues 1219, 1335, 1337, and/or 1218. In some embodiments, the NGT PAM variant is selected with mutations for improved recognition from the variants provided in Table 5 below.

[0326] In some embodiments, base editors with specificity for NGT PAM may be generated as provided in Table 6 below.

TABLE 6
NGT PAM Variants

| | NGTN | | | | | | | |
|---|---|---|---|---|---|---|---|---|
| | variant | D1135 | S1136 | G1218 | E1219 | A1322R | R1335 | T1337 |
| Variant 1 | LRKIQK | L | R | K | I | — | Q | K |
| Variant 2 | LRSVQK | L | R | S | V | — | Q | K |
| Variant 3 | LRSVQL | L | R | S | V | — | Q | L |
| Variant 4 | LRKIRQK | L | R | K | I | R | Q | K |
| Variant 5 | LRSVRQK | L | R | S | V | R | Q | K |
| Variant 6 | LRSVRQL | L | R | S | V | R | Q | L |

[0327] In some embodiments the NGTN variant is variant 1. In some embodiments, the NGTN variant is variant 2. In some embodiments, the NGTN variant is variant 3. In some embodiments, the NGTN variant is variant 4. In some embodiments, the NGTN variant is variant 5. In some embodiments, the NGTN variant is variant 6.

[0328] In some embodiments, the Cas9 domain is a Cas9 domain from Streptococcus pyogenes (SpCas9). In some embodiments, the SpCas9 domain is a nuclease active SpCas9, a nuclease inactive SpCas9 (SpCas9d), or a SpCas9 nickase (SpCas9n). In some embodiments, the SpCas9 comprises a D9X mutation, or a corresponding mutation in any of the amino acid sequences provided herein, wherein X is any amino acid except for D. In some embodiments, the SpCas9 comprises a D9A mutation, or a corresponding mutation in any of the amino acid sequences provided herein. In some embodiments, the SpCas9 domain, the SpCas9d domain, or the SpCas9n domain can bind to a nucleic acid sequence having a non-canonical PAM. In some embodiments, the SpCas9 domain, the SpCas9d domain, or the SpCas9n domain can bind to a nucleic acid sequence having an NGG, a NGA, or a NGCG PAM sequence. In some embodiments, the SpCas9 domain comprises one or more of a D1135X, a R1335X, and a T1337X mutation, or a corresponding mutation in any of the amino acid sequences provided herein, wherein X is any amino acid. In some embodiments, the SpCas9 domain comprises one or more of a D1135E, R1335Q, and T1337R mutation, or a corresponding mutation in any of the amino acid sequences provided herein. In some embodiments, the SpCas9 domain comprises a D1135E, a R1335Q, and a T1337R mutation, or corresponding mutations in any of the amino acid sequences provided herein. In some embodiments, the SpCas9 domain comprises one or more of a D1135X, a R1335X, and a T1337X mutation, or a corresponding mutation in any of the amino acid sequences provided herein, wherein X is any amino acid. In some embodiments, the SpCas9 domain comprises one or more of a D1135V, a R1335Q, and a T1337R mutation, or a corresponding mutation in any of the amino acid sequences provided herein. In some embodiments, the SpCas9 domain comprises a D1135V, a R1335Q, and a T1337R mutation, or corresponding mutations in any of the amino acid sequences provided herein. In some embodiments, the SpCas9 domain comprises one or more of a D1135X, a G1218X, a R1335X, and a T1337X mutation, or a corresponding mutation in any of the amino acid sequences provided herein, wherein X is any amino acid. In some embodiments, the SpCas9 domain comprises one or more of a D1135V, a G1218R, a R1335Q, and a T1337R mutation, or a corresponding mutation in any of the amino acid sequences provided herein. In some embodiments, the SpCas9 domain comprises a D1135V, a G1218R, a R1335Q, and a T1337R mutation, or corresponding mutations in any of the amino acid sequences provided herein.

[0329] In some embodiments, the Cas9 domains of any of the fusion proteins provided herein comprises an amino acid sequence that is at least 60%, at least 65%, at least 70%, at least 75%, at least 80%, at least 85%, at least 90%, at least 95%, at least 96%, at least 97%, at least 98%, at least 99%, or at least 99.5% identical to a Cas9 polypeptide described herein. In some embodiments, the Cas9 domains of any of the fusion proteins provided herein comprises the amino acid sequence of any Cas9 polypeptide described herein. In some embodiments, the Cas9 domains of any of the fusion proteins provided herein consists of the amino acid sequence of any Cas9 polypeptide described herein.

[0330] In some examples, a PAM recognized by a CRISPR protein-derived domain of a base editor disclosed herein can be provided to a cell on a separate oligonucleotide to an insert (e.g., an AAV insert) encoding the base editor. In such embodiments, providing PAM on a separate oligonucleotide can allow cleavage of a target sequence that otherwise would not be able to be cleaved, because no adjacent PAM is present on the same polynucleotide as the target sequence.

[0331] In an embodiment, S. pyogenes Cas9 (SpCas9) can be used as a CRISPR endonuclease for genome engineering. However, others can be used. In some embodiments, a different endonuclease can be used to target certain genomic targets. In some embodiments, synthetic SpCas9-derived variants with non-NGG PAM sequences can be used. Additionally, other Cas9 orthologues from various species have been identified and these “non-SpCas9s” can bind a variety of PAM sequences that can also be useful for the present disclosure. For example, the relatively large size of SpCas9 (approximately 4 kb coding sequence) can lead to plasmids carrying the SpCas9 cDNA that cannot be efficiently expressed in a cell. Conversely, the coding sequence for Staphylococcus aureus Cas9 (SaCas9) is approximately 1 kilobase shorter than SpCas9, possibly allowing it to be efficiently expressed in a cell. Similar to SpCas9, the SaCas9 endonuclease is capable of modifying target genes in mammalian cells in vitro and in mice in vivo. In some embodiments, a Cas protein can target a different PAM sequence. In some embodiments, a target gene can be adjacent to a Cas9 PAM, 5′-NGG, for example. In other embodiments, other Cas9 orthologs can have different PAM requirements. For example, other PAMs such as those of S. thermophilus (5′-NNAGAA for CRISPR1 and 5′-NGGNG for CRISPR3) and Neisseria meningiditis (5′-NNNNGATT) can also be found adjacent to a target gene.

[0332] In some embodiments, for a S. pyogenes system, a target gene sequence can precede (i.e., be 5′ to) a 5′-NGG PAM, and a 20-nt guide RNA sequence can base pair with an opposite strand to mediate a Cas9 cleavage adjacent to a PAM. In some embodiments, an adjacent cut can be or can be about 3 base pairs upstream of a PAM. In some embodiments, an adjacent cut can be or can be about 10 base pairs upstream of a PAM. In some embodiments, an adjacent cut can be or can be about 0-20 base pairs upstream of a PAM. For example, an adjacent cut can be next to, 1, 2, 3, 4, 5, 6, 7, 8, 9, 10, 11, 12, 13, 14, 15, 16, 17, 18, 19, 20, 21, 22, 23, 24, 25, 26, 27, 28, 29, or 30 base pairs upstream of a PAM. An adjacent cut can also be downstream of a PAM by 1 to 30 base pairs. The sequences of exemplary SpCas9 proteins capable of binding a PAM sequence follow:

[0333] The amino acid sequence of an exemplary PAM-binding SpCas9 is as follows:

MDKKYSIGLDIGTNSVGWAVITDEYKVPSKKFKVLGNTDRHSIKKNLIGAL
LFDSGETAEATRLKRTARRRYTRRKNRICYLQEIFSNEMAKVDDSFFHRLE
ESFLVEEDKKHERHPIFGNIVDEVAYHEKYPTIYHLRKKLVDSTDKADLRL
IYLALAHMIKFRGHFLIEGDLNPDNSDVDKLEIQLVQTYNQLFEENPINAS
GVDAKAILSARLSKSRRLENLIAQLPGEKKNGLFGNLIALSLGLTPNFKSN
FDLAEDAKLQLSKDTYDDDLDNLLAQIGDQYADLFLAAKNLSDAILLSDIL
RVNTEITKAPLSASMIKRYDEHHQDLTLLKALVRQQLPEKYKEIFFDQSKN
GYAGYIDGGASQEEFYKFIKPILEKMDGTEELLVKLNREDLLRKQRTFDNG
SIPHQIHLGELHAILRRQEDFYPFLKDNREKIEKILTFRIPYYVGPLARGN
SRFAWMTRKSEETITPWNFEEVVDKGASAQSFIERMTNFDKNLPNEKVLPK
HSLLYEYFTVYNELTKVKYVTEGMRKPAFLSGEQKKAIVDLLFKTNRKVTV
KQLKEDYFKKIECFDSVEISGVEDRFNASLGTYHDLLKIIKDKDFLDNEEN
EDILEDIVLTLTLFEDREMIEERLKTYAHLFDDKVMKQLKRRRYTGWGRLS
RKLINGIRDKQSGKTILDFLKSDGFANRNFMQLIHDDSLTFKEDIQKAQVS
GQGDSLHEHIANLAGSPAIKKGILQTVKVVDELVKVMGRHKPENIVIEMAR
ENQTTQKGQKNSRERMKRIEEGIKELGSQILKEHPVENTQLQNEKLYLYYL
QNGRDMYVDQELDINRLSDYDVDHIVPQSFLKDDSIDNKVLTRSDKNRGKS
DNVPSEEVVKKMKNYWRQLLNAKLITQRKFDNLTKAERGGLSELDKAGFIK
RQLVETRQITKHVAQILDSRMNTKYDENDKLIREVKVITLKSKLVSDFRKD
FQFYKVREINNYHHAHDAYLNAVVGTALIKKYPKLESEFVYGDYKVYDVRK
MIAKSEQEIGKATAKYFFYSNIMNFFKTEITLANGEIRKRPLIETNGETGE
IVWDKGRDFATVRKVLSMPQVNIVKKTEVQTGGFSKESILPKRNSDKLIAR
KKDWDPKKYGGFDSPTVAYSVLVVAKVEKGKSKKLKSVKELLGITIMERSS
FEKNPIDFLEAKGYKEVKKDLIIKLPKYSLFELENGRKRMLASAGELQKGN
ELALPSKYVNFLYLASHYEKLKGSPEDNEQKQLFVEQHKHYLDEIIEQISE
FSKRVILADANLDKVLSAYNKHRDKPIREQAENIIHLFTLTNLGAPAAFKY
FDTTIDRKRYTSTKEVLDATLIHQSITGLYETRIDLSQLGGD

[0334] The amino acid sequence of an exemplary PAM-binding SpCas9n is as follows:

MDKKYSIGLAIGTNSVGWAVITDEYKVPSKKFKVLGNTDRHSIKKNLIGAL
LFDSGETAEATRLKRTARRRYTRRKNRICYLQEIFSNEMAKVDDSFFHRLE
ESFLVEEDKKHERHPIFGNIVDEVAYHEKYPTIYHLRKKLVDSTDKADLRL
IYLALAHMIKFRGHFLIEGDLNPDNSDVDKLFIQLVQTYNQLFEENPINAS
GVDAKAILSARLSKSRRLENLIAQLPGEKKNGLFGNLIALSLGLTPNFKSN
FDLAEDAKLQLSKDTYDDDLDNLLAQIGDQYADLFLAAKNLSDAILLSDIL
RVNTEITKAPLSASMIKRYDEHHQDLTLLKALVRQQLPEKYKEIFFDQSKN
GYAGYIDGGASQEEFYKFIKPILEKMDGTEELLVKLNREDLLRKQRTFDNG
SIPHQIHLGELHAILRRQEDFYPFLKDNREKIEKILTFRIPYYVGPLARGN
SRFAWMTRKSEETITPWNFEEVVDKGASAQSFIERMTNFDKNLPNEKVLPK
HSLLYEYFTVYNELTKVKYVTEGMRKPAFLSGEQKKAIVDLLFKTNRKVTV
KQLKEDYFKKIECFDSVEISGVEDRFNASLGTYHDLLKIIKDKDFLDNEEN
EDILEDIVLTLTLFEDREMIEERLKTYAHLFDDKVMKQLKRRRYTGWGRLS
RKLINGIRDKQSGKTILDFLKSDGFANRNFMQLIHDDSLTFKEDIQKAQVS
GQGDSLHEHIANLAGSPAIKKGILQTVKVVDELVKVMGRHKPENIVIEMAR
ENQTTQKGQKNSRERMKRIEEGIKELGSQILKEHPVENTQLQNEKLYLYYL
QNGRDMYVDQELDINRLSDYDVDHIVPQSFLKDDSIDNKVLTRSDKNRGKS
DNVPSEEVVKKMKNYWRQLLNAKLITQRKFDNLTKAERGGLSELDKAGFIK
RQLVETRQITKHVAQILDSRMNTKYDENDKLIREVKVITLKSKLVSDFRKD
FQFYKVREINNYHHAHDAYLNAVVGTALIKKYPKLESEFVYGDYKVYDVRK
MIAKSEQEIGKATAKYFFYSNIMNFFKTEITLANGEIRKRPLIETNGETGE
IVWDKGRDFATVRKVLSMPQVNIVKKTEVQTGGFSKESILPKRNSDKLIAR
KKDWDPKKYGGFDSPTVAYSVLVVAKVEKGKSKKLKSVKELLGITIMERSS
FEKNPIDFLEAKGYKEVKKDLIIKLPKYSLFELENGRKRMLASAGELQKGN
ELALPSKYVNELYLASHYEKLKGSPEDNEQKQLFVEQHKHYLDEIIEQISE
FSKRVILADANLDKVLSAYNKHRDKPIREQAENIIHLFTLTNLGAPAAFKY
FDTTIDRKRYTSTKEVLDATLIHQSITGLYETRIDLSQLGGD

[0335] The amino acid sequence of an exemplary PAM-binding SpEQR Cas9 is as follows:

MDKKYSIGLAIGTNSVGWAVITDEYKVPSKKFKVLGNTDRHSIKKNLIGAL
LFDSGETAEATRLKRTARRRYTRRKNRICYLQEIFSNEMAKVDDSFFHRLE
ESFLVEEDKKHERHPIFGNIVDEVAYHEKYPTIYHLRKKLVDSTDKADLRL
IYLALAHMIKFRGHFLIEGDLNPDNSDVDKLFIQLVQTYNQLFEENPINAS
GVDAKAILSARLSKSRRLENLIAQLPGEKKNGLFGNLIALSLGLTPNFKSN
FDLAEDAKLQLSKDTYDDDLDNLLAQIGDQYADLFLAAKNLSDAILLSDIL
RVNTEITKAPLSASMIKRYDEHHQDLTLLKALVRQQLPEKYKEIFFDQSKN
GYAGYIDGGASQEEFYKFIKPILEKMDGTEELLVKLNREDLLRKQRTFDNG
SIPHQIHLGELHAILRRQEDFYPFLKDNREKIEKILTFRIPYYVGPLARGN
SRFAWMTRKSEETITPWNFEEVVDKGASAQSFIERMTNFDKNLPNEKVLPK
HSLLYEYFTVYNELTKVKYVTEGMRKPAFLSGEQKKAIVDLLFKTNRKVTV
KQLKEDYFKKIECFDSVEISGVEDRFNASLGTYHDLLKIIKDKDFLDNEEN
EDILEDIVLTLTLFEDREMIEERLKTYAHLFDDKVMKQLKRRRYTGWGRLS
RKLINGIRDKQSGKTILDFLKSDGFANRNFMQLIHDDSLTFKEDIQKAQVS
GQGDSLHEHIANLAGSPAIKKGILQTVKVVDELVKVMGRHKPENIVIEMAR
ENQTTQKGQKNSRERMKRIEEGIKELGSQILKEHPVENTQLQNEKLYLYYL
QNGRDMYVDQELDINRLSDYDVDHIVPQSFLKDDSIDNKVLTRSDKNRGKS
DNVPSEEVVKKMKNYWRQLLNAKLITQRKFDNLTKAERGGLSELDKAGFIK
RQLVETRQITKHVAQILDSRMNTKYDENDKLIREVKVITLKSKLVSDFRKD
FQFYKVREINNYHHAHDAYLNAVVGTALIKKYPKLESEFVYGDYKVYDVRK
MIAKSEQEIGKATAKYFFYSNIMNFFKTEITLANGEIRKRPLIETNGETGE
IVWDKGRDFATVRKVLSMPQVNIVKKTEVQTGGFSKESILPKRNSDKLIAR
KKDWDPKKYGGF [symbol] SPTVAYSVLVVAKVEKGKSKKLKSVKELLGITIMERSS
FEKNPIDFLEAKGYKEVKKDLIIKLPKYSLFELENGRKRMLASAGELQKGN
ELALPSKYVNFLYLASHYEKLKGSPEDNEQKQLFVEQHKHYLDEIIEQISE
FSKRVILADANLDKVLSAYNKHRDKPIREQAENIIHLFTLTNLGAPAAFKY
FDTTIDRK [symbol] Y [symbol] STKEVLDATLIHQSITGLYETRIDLSQLGGD

[0336] In the above sequence, residues E1135, Q1335, and R1337, which can be mutated from D1135, R1335, and T1337 to yield a SpEQR Cas9, are underlined and in bold.

[0337] The amino acid sequence of an exemplary PAM-binding SpVQR Cas9 is as follows:

MDKKYSIGLAIGTNSVGWAVITDEYKVPSKKFKVLGNTDRHSIKKNLIGAL
LFDSGETAEATRLKRTARRRYTRRKNRICYLQEIFSNEMAKVDDSFFHRLE
ESFLVEEDKKHERHPIFGNIVDEVAYHEKYPTIYHLRKKLVDSTDKADLRL
IYLALAHMIKFRGHFLIEGDLNPDNSDVDKLFIQLVQTYNQLFEENPINAS
GVDAKAILSARLSKSRRLENLIAQLPGEKKNGLFGNLIALSLGLTPNFKSN
FDLAEDAKLQLSKDTYDDDLDNLLAQIGDQYADLFLAAKNLSDAILLSDIL
RVNTEITKAPLSASMIKRYDEHHQDLTLLKALVRQQLPEKYKEIFFDQSKN
GYAGYIDGGASQEEFYKFIKPILEKMDGTEELLVKLNREDLLRKQRTFDNG
SIPHQIHLGELHAILRRQEDFYPFLKDNREKIEKILTFRIPYYVGPLARGN
SRFAWMTRKSEETITPWNFEEVVDKGASAQSFIERMTNFDKNLPNEKVLPK
HSLLYEYFTVYNELTKVKYVTEGMRKPAFLSGEQKKAIVDLLFKTNRKVTV
KQLKEDYFKKIECFDSVEISGVEDRFNASLGTYHDLLKIIKDKDFLDNEEN
EDILEDIVLTLTLFEDREMIEERLKTYAHLFDDKVMKQLKRRRYTGWGRLS
RKLINGIRDKQSGKTILDFLKSDGFANRNFMQLIHDDSLTFKEDIQKAQVS
GQGDSLHEHIANLAGSPAIKKGILQTVKVVDELVKVMGRHKPENIVIEMAR
ENQTTQKGQKNSRERMKRIEEGIKELGSQILKEHPVENTQLQNEKLYLYYL
QNGRDMYVDQELDINRLSDYDVDHIVPQSFLKDDSIDNKVLTRSDKNRGKS
DNVPSEEVVKKMKNYWRQLLNAKLITQRKFDNLTKAERGGLSELDKAGFIK
RQLVETRQITKHVAQILDSRMNTKYDENDKLIREVKVITLKSKLVSDFRKD
FQFYKVREINNYHHAHDAYLNAVVGTALIKKYPKLESEFVYGDYKVYDVRK
MIAKSEQEIGKATAKYFFYSNIMNFFKTEITLANGEIRKRPLIETNGETGE
IVWDKGRDFATVRKVLSMPQVNIVKKTEVQTGGFSKESILPKRNSDKLIAR
KKDWDPKKYGGFVSPTVAYSVLVVAKVEKGKSKKLKSVKELLGITIMERSS
FEKNPIDFLEAKGYKEVKKDLIIKLPKYSLFELENGRKRMLASAGELQKGN
ELALPSKYVNFLYLASHYEKLKGSPEDNEQKQLFVEQHKHYLDEIIEQISE
FSKRVILADANLDKVLSAYNKHRDKPIREQAENIIHLFTLTNLGAPAAFKY
FDTTIDRKQYRSTKEVLDATLIHQSITGLYETRIDLSQLGGD

[0338] Residues V1135, Q1335, and R1337 above, which can be mutated from D1135, R1335, and T1337 to yield a SpVQR Cas9, are underlined and in bold.

[0339] The amino acid sequence of an exemplary PAM-binding SpVRER Cas9 is as follows:

MDKKYSIGLAIGTNSVGWAVITDEYKVPSKKFKVLGNTDRHSIKKNLIGAL
LFDSGETAEATRLKRTARRRYTRRKNRICYLQEIFSNEMAKVDDSFFHRLE
ESFLVEEDKKHERHPIFGNIVDEVAYHEKYPTIYHLRKKLVDSTDKADLRL
IYLALAHMIKFRGHFLIEGDLNPDNSDVDKLFIQLVQTYNQLFEENPINAS
GVDAKAILSARLSKSRRLENLIAQLPGEKKNGLFGNLIALSLGLTPNFKSN
FDLAEDAKLQLSKDTYDDDLDNLLAQIGDQYADLFLAAKNLSDAILLSDIL
RVNTEITKAPLSASMIKRYDEHHQDLTLLKALVRQQLPEKYKEIFFDQSKN
GYAGYIDGGASQEEFYKFIKPILEKMDGTEELLVKLNREDLLRKQRTFDNG
SIPHQIHLGELHAILRRQEDFYPFLKDNREKIEKILTFRIPYYVGPLARGN
SRFAWMTRKSEETITPWNFEEVVDKGASAQSFIERMTNFDKNLPNEKVLPK
HSLLYEYFTVYNELTKVKYVTEGMRKPAFLSGEQKKAIVDLLFKTNRKVTV
KQLKEDYFKKIECFDSVEISGVEDRFNASLGTYHDLLKIIKDKDFLDNEEN
EDILEDIVLTLTLFEDREMIEERLKTYAHLFDDKVMKQLKRRRYTGWGRLS
RKLINGIRDKQSGKTILDFLKSDGFANRNFMQLIHDDSLTFKEDIQKAQVS
GQGDSLHEHIANLAGSPAIKKGILQTVKVVDELVKVMGRHKPENIVIEMAR
ENQTTQKGQKNSRERMKRIEEGIKELGSQILKEHPVENTQLQNEKLYLYYL
QNGRDMYVDQELDINRLSDYDVDHIVPQSFLKDDSIDNKVLTRSDKNRGKS
DNVPSEEVVKKMKNYWRQLLNAKLITQRKFDNLTKAERGGLSELDKAGFIK
RQLVETRQITKHVAQILDSRMNTKYDENDKLIREVKVITLKSKLVSDFRKD
FQFYKVREINNYHHAHDAYLNAVVGTALIKKYPKLESEFVYGDYKVYDVRK
MIAKSEQEIGKATAKYFFYSNIMNFFKTEITLANGEIRKRPLIETNGETGE
IVWDKGRDFATVRKVLSMPQVNIVKKTEVQTGGFSKESILPKRNSDKLIAR
KKDWDPKKYGGF [symbol] SPTVAYSVLVVAKVEKGKSKKLKSVKELLGITIMERSS
FEKNPIDFLEAKGYKEVKKDLIIKLPKYSLFELENGRKRMLASA [symbol] ELQKGN
ELALPSKYVNFLYLASHYEKLKGSPEDNEQKQLFVEQHKHYLDEIIEQISE
FSKRVILADANLDKVLSAYNKHRDKPIREQAENIIHLFTLTNLGAPAAFKY
FDTTIDRK [symbol] Y [symbol] STKEVLDATLIHQSITGLYETRIDLSQLGGD.

[0340] Residues V1135, R1218, E1335, and R1337 above, which can be mutated from D1135, G1218, R1335, and T1337 to yield a SpVRER Cas9, are underlined and in bold.

[0341] The amino acid sequence of an exemplary PAM-binding SpVRQR Cas9 is as follows: Exemplary SpVRQR Cas9

MDKKYSIGLAIGTNSVGWAVITDEYKVPSKKFKVLGNTDRHSIKKNLIGAL
LFDSGETAEATRLKRTARRRYTRRKNRICYLQEIFSNEMAKVDDSFFHRLE
ESFLVEEDKKHERHPIFGNIVDEVAYHEKYPTIYHLRKKLVDSTDKADLRL
IYLALAHMIKFRGHFLIEGDLNPDNSDVDKLFIQLVQTYNQLFEENPINAS
GVDAKAILSARLSKSRRLENLIAQLPGEKKNGLFGNLIALSLGLTPNFKSN
FDLAEDAKLQLSKDTYDDDLDNLLAQIGDQYADLFLAAKNLSDAILLSDIL
RVNTEITKAPLSASMIKRYDEHHQDLTLLKALVRQQLPEKYKEIFFDQSKN
GYAGYIDGGASQEEFYKFIKPILEKMDGTEELLVKLNREDLLRKQRTFDNG
SIPHQIHLGELHAILRRQEDFYPFLKDNREKIEKILTFRIPYYVGPLARGN
SRFAWMTRKSEETITPWNFEEVVDKGASAQSFIERMTNFDKNLPNEKVLPK
HSLLYEYFTVYNELTKVKYVTEGMRKPAFLSGEQKKAIVDLLFKTNRKVTV
KQLKEDYFKKIECFDSVEISGVEDRFNASLGTYHDLLKIIKDKDFLDNEEN
EDILEDIVLTLTLFEDREMIEERLKTYAHLFDDKVMKQLKRRRYTGWGRLS
RKLINGIRDKQSGKTILDFLKSDGFANRNFMQLIHDDSLTFKEDIQKAQVS
GQGDSLHEHIANLAGSPAIKKGILQTVKVVDELVKVMGRHKPENIVIEMAR
ENQTTQKGQKNSRERMKRIEEGIKELGSQILKEHPVENTQLQNEKLYLYYL
QNGRDMYVDQELDINRLSDYDVDHIVPQSFLKDDSIDNKVLTRSDKNRGKS
DNVPSEEVVKKMKNYWRQLLNAKLITQRKFDNLTKAERGGLSELDKAGFIK
RQLVETRQITKHVAQILDSRMNTKYDENDKLIREVKVITLKSKLVSDFRKD
FQFYKVREINNYHHAHDAYLNAVVGTALIKKYPKLESEFVYGDYKVYDVRK
MIAKSEQEIGKATAKYFFYSNIMNFFKTEITLANGEIRKRPLIETNGETGE
IVWDKGRDFATVRKVLSMPQVNIVKKTEVQTGGFSKESILPKRNSDKLIAR
KKDWDPKKYGGF [symbol] SPTVAYSVLVVAKVEKGKSKKLKSVKELLGITIMERSS
FEKNPIDFLEAKGYKEVKKDLIIKLPKYSLFELENGRKRMLASA [symbol] ELQKGN
ELALPSKYVNELYLASHYEKLKGSPEDNEQKQLFVEQHKHYLDEIIEQISE
FSKRVILADANLDKVLSAYNKHRDKPIREQAENIIHLFTLTNLGAPAAFKY
FDTTIDRK [symbol] Y [symbol] STKEVLDATLIHQSITGLYETRIDLSQLGGD.

[0342] Residues V1135, R1218, Q1335, and R1337 above, which can be mutated from D1135, G1218, R1335, and T1337 to yield a SpVRQR Cas9, are underlined and in bold.

[0343] In some embodiments, engineered SpCas9 variants are capable of recognizing protospacer adjacent motif (PAM) sequences flanked by a 3′ H (non-G PAM) (see Tables 1A-1D). In some embodiments, the SpCas9 variants recognize NRNH PAMs (where R is A or G and H is A, C or T). In some embodiments, the non-G PAM is NRRH, NRTH, or NRCH (see e.g., Miller, S. M., et al. Continuous evolution of SpCas9 variants compatible with non-G PAMs, Nat. Biotechnol. (2020), the contents of which is incorporated herein by reference in its entirety).

[0344] In some embodiments, the Cas9 domain is a recombinant Cas9 domain. In some embodiments, the recombinant Cas9 domain is a SpyMacCas9 domain. In some embodiments, the SpyMacCas9 domain is a nuclease active SpyMacCas9, a nuclease inactive SpyMacCas9 (SpyMacCas9d), or a SpyMacCas9 nickase (SpyMacCas9n). In some embodiments, the SaCas9 domain, the SaCas9d domain, or the SaCas9n domain can bind to a nucleic acid sequence having a non-canonical PAM. In some embodiments, the SpyMacCas9 domain, the SpCas9d domain, or the SpCas9n domain can bind to a nucleic acid sequence having a NAA PAM sequence.

[0345] The sequence of an exemplary Cas9 A homolog of Spy Cas9 in Streptococcus macacae with native 5′-NAAN-3′ PAM specificity is known in the art and described, for example, by Jakimo et al., (www.biorxiv.org/content/biorxiv/early/2018/09/27/429654.full.pdf), and is provided below.

[0346] Exemplary SpyMacCas9

MDKKYSIGLDIGTNSVGWAVITDDYKVPSKKFKVLGNTDRHSIKKNLIGAL
LFGSGETAEATRLKRTARRRYTRRKNRICYLQEIFSNEMAKVDDSFFHRLE
ESFLVEEDKKHERHPIFGNIVDEVAYHEKYPTIYHLRKKLADSTDKADLRL
IYLALAHMIKFRGHFLIEGDLNPDNSDVDKLFIQLVQIYNQLFEENPINAS
RVDAKAILSARLSKSRRLENLIAQLPGEKRNGLFGNLIALSLGLTPNFKSN
FDLAEDAKLQLSKDTYDDDLDNLLAQIGDQYADLFLAAKNLSDAILLSDIL
RVNSEITKAPLSASMIKRYDEHHQDLTLLKALVRQQLPEKYKEIFFDQSKN
GYAGYIDGGASQEEFYKFIKPILEKMDGTEELLVKLNREDLLRKQRTFDNG
SIPHQIHLGELHAILRRQEDFYPFLKDNREKIEKILTFRIPYYVGPLARGN
SRFAWMTRKSEETITPWNFEEVVDKGASAQSFIERMTNFDKNLPNEKVLPK
HSLLYEYFTVYNELTKVKYVTEGMRKPAFLSGEQKKAIVDLLFKTNRKVTV
KQLKEDYFKKIECFDSVEISGVEDRFNASLGAYHDLLKIIKDKDFLDNEEN
EDILEDIVLTLTLFEDRGMIEERLKTYAHLFDDKVMKQLKRRRYTGWGRLS
RKLINGIRDKQSGKTILDFLKSDGFANRNFMQLIHDDSLTFKEDIQKAQVS
GQGHSLHEQIANLAGSPAIKKGILQTVKIVDELVKVMGHKPENIVIEMARE
NQTTQKGQKNSRERMKRIEEGIKELGSQILKEHPVENTQLQNEKLYLYYLQ
NGRDMYVDQELDINRLSDYDVDHIVPQSFIKDDSIDNKVLTRSDKNRGKSD
NVPSEEVVKKMKNYWRQLLNAKLITQRKFDNLTKAERGGLSELDKAGFIKR
QLVETRQITKHVAQILDSRMNTKYDENDKLIREVKVITLKSKLVSDFRKDF
QFYKVREINNYHHAHDAYLNAVVGTALIKKYPKLESEFVYGDYKVYDVRKM
IAKSEQEIGKATAKYFFYSNIMNFFKTEITLANGEIRKRPLIETNGETGEI
VWDKGRDFATVRKVLSMPQVNIVKKTEIQTVGQNGGLFDDNPKSPLEVTPS
KLVPLKKELNPKKYGGYQKPTTAYPVLLITDTKQLIPISVMNKKQFEQNPV
KFLRDRGYQQVGKNDFIKLPKYTLVDIGDGIKRLWASSKEIHKGNQLVVSK
KSQILLYHAHHLDSDLSNDYLQNHNQQFDVLFNEIISFSKKCKLGKEHIQK
IENVYSNKKNSASIEELAESFIKLLGFTQLGATSPFNFLGVKLNQKQYKGK
KDYILPCTEGTLIRQSITGLYETRVDLSKIGED.

[0347] In some embodiments, a variant Cas9 protein harbors, H840A, P475A, W476A, N477A, D1125A, W1126A, and D1218A mutations such that the polypeptide has a reduced ability to cleave a target DNA or RNA. Such a Cas9 protein has a reduced ability to cleave a target DNA (e.g., a single stranded target DNA) but retains the ability to bind a target DNA (e.g., a single stranded target DNA). As another non-limiting example, in some embodiments, the variant Cas9 protein harbors D10A, H840A, P475A, W476A, N477A, D1125A, W1126A, and D1218A mutations such that the polypeptide has a reduced ability to cleave a target DNA. Such a Cas9 protein has a reduced ability to cleave a target DNA (e.g., a single stranded target DNA) but retains the ability to bind a target DNA (e.g., a single stranded target DNA). In some embodiments, when a variant Cas9 protein harbors W476A and W1126A mutations or when the variant Cas9 protein harbors P475A, W476A, N477A, D1125A, W1126A, and D1218A mutations, the variant Cas9 protein does not bind efficiently to a PAM sequence. Thus, in some such cases, when such a variant Cas9 protein is used in a method of binding, the method does not require a PAM sequence. In other words, in some embodiments, when such a variant Cas9 protein is used in a method of binding, the method can include a guide RNA, but the method can be performed in the absence of a PAM sequence (and the specificity of binding is therefore provided by the targeting segment of the guide RNA). Other residues can be mutated to achieve the above effects (i.e., inactivate one or the other nuclease portions). As non-limiting examples, residues D10, G12, G17, E762, H840, N854, N863, H982, H983, A984, D986, and/or A987 can be altered (i.e., substituted). Also, mutations other than alanine substitutions are suitable.

[0348] In some embodiments, a CRISPR protein-derived domain of a base editor can comprise all or a portion of a Cas9 protein with a canonical PAM sequence (NGG). In other embodiments, a Cas9-derived domain of a base editor can employ a non-canonical PAM sequence. Such sequences have been described in the art and would be apparent to the skilled artisan. For example, Cas9 domains that bind non-canonical PAM sequences have been described in Kleinstiver, B. P., et al., “Engineered CRISPR-Cas9 nucleases with altered PAM specificities” Nature 523, 481-485 (2015); and Kleinstiver, B. P., et al., “Broadening the targeting range of Staphylococcus aureus CRISPR-Cas9 by modifying PAM recognition” Nature Biotechnology 33, 1293-1298 (2015); the entire contents of each are hereby incorporated by reference.

Cas9 Domains with Reduced PAM Exclusivity

[0349] Typically, Cas9 proteins, such as Cas9 from S. pyogenes (spCas9), require a canonical NGG PAM sequence to bind a particular nucleic acid region, where the “N” in “NGG” is adenosine (A), thymidine (T), or cytosine (C), and the G is guanosine. This may limit the ability to edit desired bases within a genome. In some embodiments, the base editing fusion proteins provided herein may need to be placed at a precise location, for example a region comprising a target base that is upstream of the PAM. See e.g., Komor, A. C., et al., “Programmable editing of a target base in genomic DNA without double-stranded DNA cleavage” Nature 533, 420-424 (2016), the entire contents of which are hereby incorporated by reference. Accordingly, in some embodiments, any of the fusion proteins provided herein may contain a Cas9 domain that is capable of binding a nucleotide sequence that does not contain a canonical (e.g., NGG) PAM sequence. Cas9 domains that bind to non-canonical PAM sequences have been described in the art and would be apparent to the skilled artisan. For example, Cas9 domains that bind non-canonical PAM sequences have been described in Kleinstiver, B. P., et al., “Engineered CRISPR-Cas9 nucleases with altered PAM specificities” Nature 523, 481-485 (2015); and Kleinstiver, B. P., et al., “Broadening the targeting range of Staphylococcus aureus CRISPR-Cas9 by modifying PAM recognition” Nature Biotechnology 33, 1293-1298 (2015); the entire contents of each are hereby incorporated by reference.

[0350] High Fidelity Cas9 Domains

[0351] Some aspects of the disclosure provide high fidelity Cas9 domains. In some embodiments, high fidelity Cas9 domains are engineered Cas9 domains comprising one or more mutations that decrease electrostatic interactions between the Cas9 domain and a sugar-phosphate backbone of a DNA, as compared to a corresponding wild-type Cas9 domain. Without wishing to be bound by any particular theory, high fidelity Cas9 domains that have decreased electrostatic interactions with a sugar-phosphate backbone of DNA may have less off-target effects. In some embodiments, a Cas9 domain (e.g., a wild type Cas9 domain) comprises one or more mutations that decreases the association between the Cas9 domain and a sugar-phosphate backbone of a DNA. In some embodiments, a Cas9 domain comprises one or more mutations that decreases the association between the Cas9 domain and a sugar-phosphate backbone of a DNA by at least 1%, at least 2%, at least 3%, at least 4%, at least 5%, at least 10%, at least 15%, at least 20%, at least 25%, at least 30%, at least 35%, at least 40%, at least 45%, at least 50%, at least 55%, at least 60%, at least 65%, or at least 70%.

[0352] In some embodiments, any of the Cas9 fusion proteins provided herein comprise one or more of a N497X, a R661X, a Q695X, and/or a Q926X mutation, or a corresponding mutation in any of the amino acid sequences provided herein, wherein X is any amino acid. In some embodiments, any of the Cas9 fusion proteins provided herein comprise one or more of a N497A, a R661A, a Q695A, and/or a Q926A mutation, or a corresponding mutation in any of the amino acid sequences provided herein. In some embodiments, the Cas9 domain comprises a D10A mutation, or a corresponding mutation in any of the amino acid sequences provided herein. Cas9 domains with high fidelity are known in the art and would be apparent to the skilled artisan. For example, Cas9 domains with high fidelity have been described in Kleinstiver, B. P., et al. “High-fidelity CRISPR-Cas9 nucleases with no detectable genome-wide off-target effects.” Nature 529, 490-495 (2016); and Slaymaker, I. M., et al. “Rationally engineered Cas9 nucleases with improved specificity.” Science 351, 84-88 (2015); the entire contents of each are incorporated herein by reference.

[0353] In some embodiments, the modified Cas9 is a high fidelity Cas9 enzyme. In some embodiments, the high fidelity Cas9 enzyme is SpCas9(K855A), eSpCas9(1.1), SpCas9-HF1, or hyper accurate Cas9 variant (HypaCas9). The modified Cas9 eSpCas9(1.1) contains alanine substitutions that weaken the interactions between the HNH/RuvC groove and the non-target DNA strand, preventing strand separation and cutting at off-target sites. Similarly, SpCas9-HF1 lowers off-target editing through alanine substitutions that disrupt Cas9's interactions with the DNA phosphate backbone. HypaCas9 contains mutations (SpCas9 N692A/M694A/Q695A/H698A) in the REC3 domain that increase Cas9 proofreading and target discrimination. All three high fidelity enzymes generate less off-target editing than wildtype Cas9.

[0354] An exemplary high fidelity Cas9 is provided below. High Fidelity Cas9 domain mutations relative to Cas9 are shown in bold and underlined.

MDKKYSIGLAIGTNSVGWAVITDEYKVPSKKFKVLGNTDRHSIKKNLIGAL
LFDSGETAEATRLKRTARRRYTRRKNRICYLQEIFSNEMAKVDDSFFHRLE
ESFLVEEDKKHERHPIFGNIVDEVAYHEKYPTIYHLRKKLVDSTDKADLRL
IYLALAHMIKFRGHFLIEGDLNPDNSDVDKLFIQLVQTYNQLFEENPINAS
GVDAKAILSARLSKSRRLENLIAQLPGEKKNGLFGNLIALSLGLTPNFKSN
FDLAEDAKLQLSKDTYDDDLDNLLAQIGDQYADLFLAAKNLSDAILLSDIL
RVNTEITKAPLSASMIKRYDEHHQDLTLLKALVRQQLPEKYKEIFFDQSKN
GYAGYIDGGASQEEFYKFIKPILEKMDGTEELLVKLNREDLLRKQRTFDNG
SIPHQIHLGELHAILRRQEDFYPFLKDNREKIEKILTFRIPYYVGPLARGN
SRFAWMTRKSEETITPWNFEEVVDKGASAQSFIERMTAFDKNLPNEKVLPK
HSLLYEYFTVYNELTKVKYVTEGMRKPAFLSGEQKKAIVDLLFKTNRKVTV
KQLKEDYFKKIECFDSVEISGVEDRFNASLGTYHDLLKIIKDKDFLDNEEN
EDILEDIVLTLTLFEDREMIEERLKTYAHLFDDKVMKQLKRRRYTGWGALS
RKLINGIRDKQSGKTILDFLKSDGFANRNFMALIHDDSLTFKEDIQKAQVS
GQGDSLHEHIANLAGSPAIKKGILQTVKVVDELVKVMGRHKPENIVIEMAR
ENQTTQKGQKNSRERMKRIEEGIKELGSQILKEHPVENTQLQNEKLYLYYL
QNGRDMYVDQELDINRLSDYDVDHIVPQSFLKDDSIDNKVLTRSDKNRGKS
DNVPSEEVVKKMKNYWRQLLNAKLITQRKFDNLTKAERGGLSELDKAGFIK
RQLVETRAITKHVAQILDSRMNTKYDENDKLIREVKVITLKSKLVSDFRKD
FQFYKVREINNYHHAHDAYLNAVVGTALIKKYPKLESEFVYGDYKVYDVRK
MIAKSEQEIGKATAKYFFYSNIMNFFKTEITLANGEIRKRPLIETNGETGE
IVWDKGRDFATVRKVLSMPQVNIVKKTEVQTGGFSKESILPKRNSDKLIAR
KKDWDPKKYGGFDSPTVAYSVLVVAKVEKGKSKKLKSVKELLGITIMERSS
FEKNPIDFLEAKGYKEVKKDLIIKLPKYSLFELENGRKRMLASAGELQKGN
ELALPSKYVNFLYLASHYEKLKGSPEDNEQKQLFVEQHKHYLDEIIEQISE
FSKRVILADANLDKVLSAYNKHRDKPIREQAENIIHLFTLTNLGAPAAFKY
FDTTIDRKRYTSTKEVLDATLIHQSITGLYETRIDLSQLGGD.

### Fusion Proteins Comprising a Nuclear Localization Sequence (NLS)

[0355] In some embodiments, the fusion proteins provided herein further comprise one or more (e.g., 2, 3, 4, 5) nuclear targeting sequences, for example a nuclear localization sequence (NLS). In one embodiment, a bipartite NLS is used. In some embodiments, an NLS comprises an amino acid sequence that facilitates the importation of a protein that comprises an NLS, into the cell nucleus (e.g., by nuclear transport). In some embodiments, any of the fusion proteins provided herein further comprise a nuclear localization sequence (NLS). In some embodiments, the NLS is fused to the N-terminus of the fusion protein. In some embodiments, the NLS is fused to the C-terminus of the fusion protein. In some embodiments, the NLS is fused to the N-terminus of the Cas9 domain. In some embodiments, the NLS is fused to the C-terminus of an nCas9 domain or a dCas9 domain. In some embodiments, the NLS is fused to the N-terminus of the deaminase. In some embodiments, the NLS is fused to the C-terminus of the deaminase. In some embodiments, the NLS is fused to the fusion protein via one or more linkers. In some embodiments, the NLS is fused to the fusion protein without a linker. In some embodiments, the NLS comprises an amino acid sequence of any one of the NLS sequences provided or referenced herein. Additional nuclear localization sequences are known in the art and would be apparent to the skilled artisan. For example, NLS sequences are described in Plank et al., PCT/EP2000/011690, the contents of which are incorporated herein by reference for their disclosure of exemplary nuclear localization sequences. In some embodiments, an NLS comprises the amino acid sequence

PKKKRKVEGADKRTADGSEFESPKKKRKV,
KRTADGSEFESPKKKRKV,
KRPAATKKAGQAKKKK,
KKTELQTTNAENKTKKL,
KRGINDRNFWRGENGRKTR,
RKSGKIAAIVVKRPRKPKKKRKV,
or
MDSLLMNRRKFLYQFKNVRWAKGRRETYLC

[0356] In some embodiments, the NLS is present in a linker or the NLS is flanked by linkers, for example, the linkers described herein. In some embodiments, the N-terminus or C-terminus NLS is a bipartite NLS. A bipartite NLS comprises two basic amino acid clusters, which are separated by a relatively short spacer sequence (hence bipartite—2 parts, while monopartite NLSs are not). The NLS of nucleoplasmin, KR[PAATKKAGQA]KKKK, is the prototype of the ubiquitous bipartite signal: two clusters of basic amino acids, separated by a spacer of about 10 amino acids. The sequence of an exemplary bipartite NLS follows:

PKKKRKVEGADKRTADGSEFESPKKKRKV.

[0357] In some embodiments, the fusion proteins as described herein do not comprise a linker sequence. In some embodiments, linker sequences between one or more of the domains or proteins are present. In some embodiments, the general architecture of exemplary Cas9 fusion proteins with an adenosine deaminase and a Cas9 domain comprises any one of the following structures, where NLS is a nuclear localization sequence (e.g., any NLS provided herein), NH2 is the N-terminus of the fusion protein, and COOH is the C-terminus of the fusion protein: NH2-NLS-[adenosine deaminase]-[Cas9 domain]-COOH; NH2-NLS-[Cas9 domain]-[adenosine deaminase]-COOH; NH2-[adenosine deaminase]-[Cas9 domain]-NLS—COOH; or NH2-[Cas9 domain]-[adenosine deaminase]-NLS—COOH.

[0358] It should be appreciated that the fusion proteins of the present disclosure may comprise one or more additional features. For example, in some embodiments, the fusion protein may comprise inhibitors, cytoplasmic localization sequences, export sequences, such as nuclear export sequences, or other localization sequences, as well as sequence tags that are useful for solubilization, purification, or detection of the fusion proteins. Suitable protein tags provided herein include, but are not limited to, biotin carboxylase carrier protein (BCCP) tags, myc-tags, calmodulin-tags, FLAG-tags, hemagglutinin (HA)-tags, polyhistidine tags, also referred to as histidine tags or His-tags, maltose binding protein (MBP)-tags, nus-tags, glutathione-S-transferase (GST)-tags, green fluorescent protein (GFP)-tags, thioredoxin-tags, S-tags, Softags (e.g., Softag 1, Softag 3), strep-tags, biotin ligase tags, FlAsH tags, V5 tags, and SBP-tags. Additional suitable sequences will be apparent to those of skill in the art. In some embodiments, the fusion protein comprises one or more His tags.

[0359] A vector that encodes a CRISPR enzyme comprising one or more nuclear localization sequences (NLSs) can be used. For example, there can be or be about 1, 2, 3, 4, 5, 6, 7, 8, 9, 10 NLSs used. A CRISPR enzyme can comprise the NLSs at or near the amino-terminus, about or more than about 1, 2, 3, 4, 5, 6, 7, 8, 9, 10 NLSs at or near the carboxy-terminus, or any combination thereof (e.g., one or more NLS at the amino-terminus and one or more NLS at the carboxy terminus). When more than one NLS is present, each can be selected independently of others, such that a single NLS can be present in more than one copy and/or in combination with one or more other NLSs present in one or more copies.

[0360] CRISPR enzymes used in the methods can comprise about 6 NLSs. An NLS is considered near the N- or C-terminus when the nearest amino acid to the NLS is within about 50 amino acids along a polypeptide chain from the N- or C-terminus, e.g., within 1, 2, 3, 4, 5, 10, 15, 20, 25, 30, 40, or 50 amino acids.

Cas9 Domains with Reduced Exclusivity

[0361] Typically, Cas9 proteins, such as Cas9 from S. pyogenes (spCas9), require a canonical NGG PAM sequence to bind a particular nucleic acid region, where the “N” in “NGG” is adenosine (A), thymidine (T), or cytosine (C), and the G is guanosine. This may limit the ability to edit desired bases within a genome. In some embodiments, the base editing fusion proteins provided herein may need to be placed at a precise location, for example a region comprising a target base that is upstream of the PAM. See e.g., Komor, A. C., et al., “Programmable editing of a target base in genomic DNA without double-stranded DNA cleavage” Nature 533, 420-424 (2016), the entire contents of which are hereby incorporated by reference. Accordingly, in some embodiments, any of the fusion proteins provided herein may contain a Cas9 domain that is capable of binding a nucleotide sequence that does not contain a canonical (e.g., NGG) PAM sequence. Cas9 domains that bind to non-canonical PAM sequences have been described in the art and would be apparent to the skilled artisan. For example, Cas9 domains that bind non-canonical PAM sequences have been described in Kleinstiver, B. P., et al., “Engineered CRISPR-Cas9 nucleases with altered PAM specificities” Nature 523, 481-485 (2015); and Kleinstiver, B. P., et al., “Broadening the targeting range of Staphylococcus aureus CRISPR-Cas9 by modifying PAM recognition” Nature Biotechnology 33, 1293-1298 (2015); Nishimasu, H., et al., “Engineered CRISPR-Cas9 nuclease with expanded targeting space” Science. 2018 Sep. 21; 361(6408):1259-1262, Chatterjee, P., et al., Minimal PAM specificity of a highly similar SpCas9 ortholog” Sci Adv. 2018 Oct. 24; 4(10):eaau0766. doi: 10.1126/sciadv.aau0766, the entire contents of each are hereby incorporated by reference.

Fusion proteins with Internal Insertions

[0362] Provided herein are fusion proteins comprising a heterologous polypeptide fused to a nucleic acid programmable nucleic acid binding protein, for example, a napDNAbp. A heterologous polypeptide can be a polypeptide that is not found in the native or wild-type napDNAbp polypeptide sequence. The heterologous polypeptide can be fused to the napDNAbp at a C-terminal end of the napDNAbp, an N-terminal end of the napDNAbp, or inserted at an internal location of the napDNAbp. In some embodiments, the heterologous polypeptide is inserted at an internal location of the napDNAbp.

[0363] In some embodiments, the heterologous polypeptide is a deaminase or a functional fragment thereof. For example, a fusion protein can comprise a deaminase flanked by an N-terminal fragment and a C-terminal fragment of a Cas9 or Cas12 (e.g., Cas12b/C2c1), polypeptide. The deaminase in a fusion protein can be an adenosine deaminase. In some embodiments, the adenosine deaminase is a TadA (e.g., TadA7.10 or TadA*8). In some embodiments, the TadA is a TadA*8. TadA sequences (e.g., TadA7.10 or TadA*8) as described herein are suitable deaminases for the above-described fusion proteins.

[0364] The deaminase can be a circular permutant deaminase. For example, the deaminase can be a circular permutant adenosine deaminase. In some embodiments, the deaminase is a circular permutant TadA, circularly permutated at amino acid residue 116 as numbered in the TadA reference sequence. In some embodiments, the deaminase is a circular permutant TadA, circularly permutated at amino acid residue 136 as numbered in the TadA reference sequence. In some embodiments, the deaminase is a circular permutant TadA, circularly permutated at amino acid residue 65 as numbered in the TadA reference sequence.

[0365] The fusion protein can comprise more than one deaminase. The fusion protein can comprise, for example, 1, 2, 3, 4, 5 or more deaminases. In some embodiments, the fusion protein comprises one deaminase. In some embodiments, the fusion protein comprises two deaminases. The two or more deaminases can be homodimers. The two or more deaminases can be heterodimers. The two or more deaminases can be inserted in tandem in the napDNAbp. In some embodiments, the two or more deaminases may not be in tandem in the napDNAbp.

[0366] In some embodiments, the napDNAbp in the fusion protein is a Cas9 polypeptide or a fragment thereof. The Cas9 polypeptide can be a variant Cas9 polypeptide. In some embodiments, the Cas9 polypeptide is a Cas9 nickase (nCas9) polypeptide or a fragment thereof.

[0367] In some embodiments, the Cas9 polypeptide is a nuclease dead Cas9 (dCas9) polypeptide or a fragment thereof. The Cas9 polypeptide in a fusion protein can be a full-length Cas9 polypeptide. In some cases, the Cas9 polypeptide in a fusion protein may not be a full length Cas9 polypeptide. The Cas9 polypeptide can be truncated, for example, at a N-terminal or C-terminal end relative to a naturally-occurring Cas9 protein. The Cas9 polypeptide can be a circularly permuted Cas9 protein. The Cas9 polypeptide can be a fragment, a portion, or a domain of a Cas9 polypeptide, that is still capable of binding the target polynucleotide and a guide nucleic acid sequence.

[0368] In some embodiments, the Cas9 polypeptide is a Streptococcus pyogenes Cas9 (SpCas9), Staphylococcus aureus Cas9 (SaCas9), Streptococcus thermophilus 1 Cas9 (St1Cas9), or fragments or variants thereof.

[0369] The Cas9 polypeptide of a fusion protein can comprise an amino acid sequence that is at least 85%, at least 90%, at least 91%, at least 92%, at least 93%, at least 94%, at least 95%, at least 96%, at least 97%, at least 98%, at least 99%, or at least 99.5% identical to a naturally-occurring Cas9 polypeptide.

[0370] The Cas9 polypeptide of a fusion protein can comprise an amino acid sequence that is at least 85%, at least 90%, at least 91%, at least 92%, at least 93%, at least 94%, at least 95%, at least 96%, at least 97%, at least 98%, at least 99%, or at least 99.5% identical to the Cas9 amino acid sequence set forth below (called the “Cas9 reference sequence” below):

[sequence omitted]
(single underline: HNH domain; double underline:
RuvC domain).

[0371] Fusion proteins comprising a heterologous catalytic domain flanked by N- and C-terminal fragments of a Cas9 polypeptide are also useful for base editing in the methods as described herein. Fusion proteins comprising Cas9 and one or more deaminase domains, e.g., adenosine deaminase, or comprising an adenosine deaminase domain flanked by Cas9 sequences are also useful for highly specific and efficient base editing of target sequences. In an embodiment, a chimeric Cas9 fusion protein contains a heterologous catalytic domain (e.g., adenosine deaminase) inserted within a Cas9 polypeptide. In some embodiments, the fusion protein comprises an adenosine deaminase domain and an adenosine deaminase domain inserted within a Cas9. In some embodiments, an adenosine deaminase is fused within a Cas9 and an adenosine deaminase is fused to the C-terminus. In some embodiments, an adenosine deaminase is fused within Cas9 and an adenosine deaminase fused to the N-terminus. In some embodiments, an adenosine deaminase is fused within Cas9 and an adenosine deaminase is fused to the C-terminus. In some embodiments, an adenosine deaminase is fused within Cas9 and an adenosine deaminase fused to the N-terminus.

[0372] In various embodiments, the catalytic domain has DNA modifying activity (e.g., deaminase activity), such as adenosine deaminase activity. In some embodiments, the adenosine deaminase is a TadA (e.g., TadA7.10). In some embodiments, the TadA is a TadA*8. In some embodiments, a TadA*8 is fused within Cas9 and an adenosine deaminase is fused to the C-terminus. In some embodiments, a TadA*8 is fused within Cas9 and an adenosine deaminase fused to the N-terminus. In some embodiments, an adenosine deaminase is fused within Cas9 and a TadA*8 is fused to the C-terminus. In some embodiments, an adenosine deaminase is fused within Cas9 and a TadA*8 fused to the N-terminus. Exemplary structures of a fusion protein with a TadA*8 and an adenosine deaminase and a Cas9 are provided as follows: NH2-[Cas9(TadA*8)]-[adenosine deaminase]-COOH; NH2-[adenosine deaminase]-[Cas9(TadA*8)]-COOH; NH2-[Cas9(adenosine deaminase)]-[TadA*8]-COOH; or NH2-[TadA*8]-[Cas9(adenosine deaminase)]-COOH.

[0373] In some embodiments, the “-” used in the general architecture above indicates the presence of an optional linker.

[0374] The heterologous polypeptide (e.g., deaminase) can be inserted in the napDNAbp (e.g., Cas9 or Cas12 (e.g., Cas12b/C2c1)) at a suitable location, for example, such that the napDNAbp retains its ability to bind the target polynucleotide and a guide nucleic acid. A deaminase (e.g., adenosine deaminase) can be inserted into a napDNAbp without compromising function of the deaminase (e.g., base editing activity) or the napDNAbp (e.g., ability to bind to target nucleic acid and guide nucleic acid). A deaminase (e.g., adenosine deaminase) can be inserted in the napDNAbp at, for example, a disordered region or a region comprising a high temperature factor or B-factor as shown by crystallographic studies. Regions of a protein that are less ordered, disordered, or unstructured, for example solvent exposed regions and loops, can be used for insertion without compromising structure or function. A deaminase (e.g., adenosine deaminase)can be inserted in the napDNAbp in a flexible loop region or a solvent-exposed region. In some embodiments, the deaminase (e.g., adenosine deaminase) is inserted in a flexible loop of the Cas9 or the Cas12b/C2c1 polypeptide.

[0375] In some embodiments, the insertion location of a deaminase (e.g., adenosine deaminase) is determined by B-factor analysis of the crystal structure of Cas9 polypeptide. In some embodiments, the deaminase (e.g., adenosine deaminase) is inserted in regions of the Cas9 polypeptide comprising higher than average B-factors (e.g., higher B factors compared to the total protein or the protein domain comprising the disordered region). B-factor or temperature factor can indicate the fluctuation of atoms from their average position (for example, as a result of temperature-dependent atomic vibrations or static disorder in a crystal lattice). A high B-factor (e.g., higher than average B-factor) for backbone atoms can be indicative of a region with relatively high local mobility. Such a region can be used for inserting a deaminase without compromising structure or function. A deaminase (e.g., adenosine deaminase) can be inserted at a location with a residue having a Ca atom with a B-factor that is 50%, 60%, 70%, 80%, 90%, 100%, 110%, 120%, 130%, 140%, 150%, 160%, 170%, 180%, 190%, 200%, or greater than 200% more than the average B-factor for the total protein. A deaminase (e.g., adenosine deaminase) can be inserted at a location with a residue having a Ca atom with a B-factor that is 50%, 60%, 70%, 80%, 90%, 100%, 110%, 120%, 130%, 140%, 150%, 160%, 170%, 180%, 190%, 200% or greater than 200% more than the average B-factor for a Cas9 protein domain comprising the residue. Cas9 polypeptide positions comprising a higher than average B-factor can include, for example, residues 768, 792, 1052, 1015, 1022, 1026, 1029, 1067, 1040, 1054, 1068, 1246, 1247, and 1248 as numbered in the above Cas9 reference sequence. Cas9 polypeptide regions comprising a higher than average B-factor can include, for example, residues 792-872, 792-906, and 2-791 as numbered in the above Cas9 reference sequence.

[0376] A heterologous polypeptide (e.g., deaminase) can be inserted in the napDNAbp at an amino acid residue selected from the group consisting of: 768, 791, 792, 1015, 1016, 1022, 1023, 1026, 1029, 1040, 1052, 1054, 1067, 1068, 1069, 1246, 1247, and 1248 as numbered in the above Cas9 reference sequence, or a corresponding amino acid residue in another Cas9 polypeptide. In some embodiments, the heterologous polypeptide is inserted between amino acid positions 768-769, 791-792, 792-793, 1015-1016, 1022-1023, 1026-1027, 1029-1030, 1040-1041, 1052-1053, 1054-1055, 1067-1068, 1068-1069, 1247-1248, or 1248-1249 as numbered in the above Cas9 reference sequence or corresponding amino acid positions thereof. In some embodiments, the heterologous polypeptide is inserted between amino acid positions 769-770, 792-793, 793-794, 1016-1017, 1023-1024, 1027-1028, 1030-1031, 1041-1042, 1053-1054, 1055-1056, 1068-1069, 1069-1070, 1248-1249, or 1249-1250 as numbered in the above Cas9 reference sequence or corresponding amino acid positions thereof. In some embodiments, the heterologous polypeptide replaces an amino acid residue selected from the group consisting of: 768, 791, 792, 1015, 1016, 1022, 1023, 1026, 1029, 1040, 1052, 1054, 1067, 1068, 1069, 1246, 1247, and 1248 as numbered in the above Cas9 reference sequence, or a corresponding amino acid residue in another Cas9 polypeptide. It should be understood that the reference to the above Cas9 reference sequence with respect to insertion positions is for illustrative purposes. The insertions as discussed herein are not limited to the Cas9 polypeptide sequence of the above Cas9 reference sequence, but include insertion at corresponding locations in variant Cas9 polypeptides, for example a Cas9 nickase (nCas9), nuclease dead Cas9 (dCas9), a Cas9 variant lacking a nuclease domain, a truncated Cas9, or a Cas9 domain lacking partial or complete HNH domain.

[0377] A heterologous polypeptide (e.g., deaminase) can be inserted in the napDNAbp at an amino acid residue selected from the group consisting of: 768, 792, 1022, 1026, 1040, 1068, and 1247 as numbered in the above Cas9 reference sequence, or a corresponding amino acid residue in another Cas9 polypeptide. In some embodiments, the heterologous polypeptide is inserted between amino acid positions 768-769, 792-793, 1022-1023, 1026-1027, 1029-1030, 1040-1041, 1068-1069, or 1247-1248 as numbered in the above Cas9 reference sequence or corresponding amino acid positions thereof. In some embodiments, the heterologous polypeptide is inserted between amino acid positions 769-770, 793-794, 1023-1024, 1027-1028, 1030-1031, 1041-1042, 1069-1070, or 1248-1249 as numbered in the above Cas9 reference sequence or corresponding amino acid positions thereof. In some embodiments, the heterologous polypeptide replaces an amino acid residue selected from the group consisting of: 768, 792, 1022, 1026, 1040, 1068, and 1247 as numbered in the above Cas9 reference sequence, or a corresponding amino acid residue in another Cas9 polypeptide.

[0378] A heterologous polypeptide (e.g., deaminase) can be inserted in the napDNAbp at an amino acid residue as described herein, or a corresponding amino acid residue in another Cas9 polypeptide. In an embodiment, a heterologous polypeptide (e.g., deaminase) can be inserted in the napDNAbp at an amino acid residue selected from the group consisting of: 1002, 1003, 1025, 1052-1056, 1242-1247, 1061-1077, 943-947, 686-691, 569-578, 530-539, and 1060-1077 as numbered in the above Cas9 reference sequence, or a corresponding amino acid residue in another Cas9 polypeptide. The deaminase (e.g., adenosine deaminase) can be inserted at the N-terminus or the C-terminus of the residue or replace the residue. In some embodiments, the deaminase (e.g., adenosine deaminase) is inserted at the C-terminus of the residue.

[0379] In some embodiments, an adenosine deaminase (e.g., TadA) is inserted at an amino acid residue selected from the group consisting of: 1015, 1022, 1029, 1040, 1068, 1247, 1054, 1026, 768, 1067, 1248, 1052, and 1246 as numbered in the above Cas9 reference sequence, or a corresponding amino acid residue in another Cas9 polypeptide. In some embodiments, an adenosine deaminase (e.g., TadA) is inserted in place of residues 792-872, 792-906, or 2-791 as numbered in the above Cas9 reference sequence, or a corresponding amino acid residue in another Cas9 polypeptide. In some embodiments, the adenosine deaminase is inserted at the N-terminus of an amino acid selected from the group consisting of: 1015, 1022, 1029, 1040, 1068, 1247, 1054, 1026, 768, 1067, 1248, 1052, and 1246 as numbered in the above Cas9 reference sequence, or a corresponding amino acid residue in another Cas9 polypeptide. In some embodiments, the adenosine deaminase is inserted at the C-terminus of an amino acid selected from the group consisting of: 1015, 1022, 1029, 1040, 1068, 1247, 1054, 1026, 768, 1067, 1248, 1052, and 1246 as numbered in the above Cas9 reference sequence, or a corresponding amino acid residue in another Cas9 polypeptide. In some embodiments, the adenosine deaminase is inserted to replace an amino acid selected from the group consisting of: 1015, 1022, 1029, 1040, 1068, 1247, 1054, 1026, 768, 1067, 1248, 1052, and 1246 as numbered in the above Cas9 reference sequence, or a corresponding amino acid residue in another Cas9 polypeptide.

[0380] In some embodiments, a CBE (e.g., APOBEC1) is inserted at an amino acid residue selected from the group consisting of: 1016, 1023, 1029, 1040, 1069, and 1247 as numbered in the above Cas9 reference sequence, or a corresponding amino acid residue in another Cas9 polypeptide. In some embodiments, the ABE is inserted at the N-terminus of an amino acid selected from the group consisting of: 1016, 1023, 1029, 1040, 1069, and 1247 as numbered in the above Cas9 reference sequence, or a corresponding amino acid residue in another Cas9 polypeptide. In some embodiments, the ABE is inserted at the C-terminus of an amino acid selected from the group consisting of: 1016, 1023, 1029, 1040, 1069, and 1247 as numbered in the above Cas9 reference sequence, or a corresponding amino acid residue in another Cas9 polypeptide. In some embodiments, the ABE is inserted to replace an amino acid selected from the group consisting of: 1016, 1023, 1029, 1040, 1069, and 1247 as numbered in the above Cas9 reference sequence, or a corresponding amino acid residue in another Cas9 polypeptide.

[0381] In some embodiments, the deaminase (e.g., adenosine deaminase) is inserted at amino acid residue 768 as numbered in the above Cas9 reference sequence, or a corresponding amino acid residue in another Cas9 polypeptide. In some embodiments, the deaminase (e.g., adenosine deaminase) is inserted at the N-terminus of amino acid residue 768 as numbered in the above Cas9 reference sequence, or a corresponding amino acid residue in another Cas9 polypeptide. In some embodiments, the deaminase (e.g., adenosine deaminase) is inserted at the C-terminus of amino acid residue 768 as numbered in the above Cas9 reference sequence, or a corresponding amino acid residue in another Cas9 polypeptide. In some embodiments, the deaminase (e.g., adenosine deaminase) is inserted to replace amino acid residue 768 as numbered in the above Cas9 reference sequence, or a corresponding amino acid residue in another Cas9 polypeptide.

[0382] In some embodiments, the deaminase (e.g., adenosine deaminase) is inserted at amino acid residue 791 or is inserted at amino acid residue 792, as numbered in the above Cas9 reference sequence, or a corresponding amino acid residue in another Cas9 polypeptide. In some embodiments, the deaminase (e.g., adenosine deaminase) is inserted at the N-terminus of amino acid residue 791 or is inserted at the N-terminus of amino acid 792, as numbered in the above Cas9 reference sequence, or a corresponding amino acid residue in another Cas9 polypeptide. In some embodiments, the deaminase (e.g., adenosine deaminase) is inserted at the C-terminus of amino acid 791 or is inserted at the N-terminus of amino acid 792, as numbered in the above Cas9 reference sequence, or a corresponding amino acid residue in another Cas9 polypeptide. In some embodiments, the deaminase (e.g., adenosine deaminase) is inserted to replace amino acid 791, or is inserted to replace amino acid 792, as numbered in the above Cas9 reference sequence, or a corresponding amino acid residue in another Cas9 polypeptide.

[0383] In some embodiments, the deaminase (e.g., adenosine deaminase) is inserted at amino acid residue 1016 as numbered in the above Cas9 reference sequence, or a corresponding amino acid residue in another Cas9 polypeptide. In some embodiments, the deaminase (e.g., adenosine deaminase) is inserted at the N-terminus of amino acid residue 1016 as numbered in the above Cas9 reference sequence, or a corresponding amino acid residue in another Cas9 polypeptide. In some embodiments, the deaminase (e.g., adenosine deaminase) is inserted at the C-terminus of amino acid residue 1016 as numbered in the above Cas9 reference sequence, or a corresponding amino acid residue in another Cas9 polypeptide. In some embodiments, the deaminase (e.g., adenosine deaminase) is inserted to replace amino acid residue 1016 as numbered in the above Cas9 reference sequence, or a corresponding amino acid residue in another Cas9 polypeptide.

[0384] In some embodiments, the deaminase (e.g., adenosine deaminase) is inserted at amino acid residue 1022, or is inserted at amino acid residue 1023, as numbered in the above Cas9 reference sequence, or a corresponding amino acid residue in another Cas9 polypeptide. In some embodiments, the deaminase (e.g., adenosine deaminase) is inserted at the N-terminus of amino acid residue 1022 or is inserted at the N-terminus of amino acid residue 1023, as numbered in the above Cas9 reference sequence, or a corresponding amino acid residue in another Cas9 polypeptide. In some embodiments, the deaminase (e.g., adenosine deaminase) is inserted at the C-terminus of amino acid residue 1022 or is inserted at the C-terminus of amino acid residue 1023, as numbered in the above Cas9 reference sequence, or a corresponding amino acid residue in another Cas9 polypeptide. In some embodiments, the deaminase (e.g., adenosine deaminase) is inserted to replace amino acid residue 1022, or is inserted to replace amino acid residue 1023, as numbered in the above Cas9 reference sequence, or a corresponding amino acid residue in another Cas9 polypeptide.

[0385] In some embodiments, the deaminase (e.g., adenosine deaminase) is inserted at amino acid residue 1026, or is inserted at amino acid residue 1029, as numbered in the above Cas9 reference sequence, or a corresponding amino acid residue in another Cas9 polypeptide. In some embodiments, the deaminase (e.g., adenosine deaminase) is inserted at the N-terminus of amino acid residue 1026 or is inserted at the N-terminus of amino acid residue 1029, as numbered in the above Cas9 reference sequence, or a corresponding amino acid residue in another Cas9 polypeptide. In some embodiments, the deaminase (e.g., adenosine deaminase) is inserted at the C-terminus of amino acid residue 1026 or is inserted at the C-terminus of amino acid residue 1029, as numbered in the above Cas9 reference sequence, or a corresponding amino acid residue in another Cas9 polypeptide. In some embodiments, the deaminase (e.g., adenosine deaminase) is inserted to replace amino acid residue 1026, or is inserted to replace amino acid residue 1029, as numbered in the above Cas9 reference sequence, or corresponding amino acid residue in another Cas9 polypeptide.

[0386] In some embodiments, the deaminase (e.g., adenosine deaminase) is inserted at amino acid residue 1040 as numbered in the above Cas9 reference sequence, or a corresponding amino acid residue in another Cas9 polypeptide. In some embodiments, the deaminase (e.g., adenosine deaminase) is inserted at the N-terminus of amino acid residue 1040 as numbered in the above Cas9 reference sequence, or a corresponding amino acid residue in another Cas9 polypeptide. In some embodiments, the deaminase (e.g., adenosine deaminase) is inserted at the C-terminus of amino acid residue 1040 as numbered in the above Cas9 reference sequence, or a corresponding amino acid residue in another Cas9 polypeptide. In some embodiments, the deaminase (e.g., adenosine deaminase) is inserted to replace amino acid residue 1040 as numbered in the above Cas9 reference sequence, or a corresponding amino acid residue in another Cas9 polypeptide.

[0387] In some embodiments, the deaminase (e.g., adenosine deaminase) is inserted at amino acid residue 1052, or is inserted at amino acid residue 1054, as numbered in the above Cas9 reference sequence, or a corresponding amino acid residue in another Cas9 polypeptide. In some embodiments, the deaminase (e.g., adenosine deaminase) is inserted at the N-terminus of amino acid residue 1052 or is inserted at the N-terminus of amino acid residue 1054, as numbered in the above Cas9 reference sequence, or a corresponding amino acid residue in another Cas9 polypeptide. In some embodiments, the deaminase (e.g., adenosine deaminase) is inserted at the C-terminus of amino acid residue 1052 or is inserted at the C-terminus of amino acid residue 1054, as numbered in the above Cas9 reference sequence, or a corresponding amino acid residue in another Cas9 polypeptide. In some embodiments, the deaminase (e.g., adenosine deaminase) is inserted to replace amino acid residue 1052, or is inserted to replace amino acid residue 1054, as numbered in the above Cas9 reference sequence, or a corresponding amino acid residue in another Cas9 polypeptide.

[0388] In some embodiments, the deaminase (e.g., adenosine deaminase) is inserted at amino acid residue 1067, or is inserted at amino acid residue 1068, or is inserted at amino acid residue 1069, as numbered in the above Cas9 reference sequence, or a corresponding amino acid residue in another Cas9 polypeptide. In some embodiments, the deaminase (e.g., adenosine deaminase) is inserted at the N-terminus of amino acid residue 1067 or is inserted at the N-terminus of amino acid residue 1068 or is inserted at the N-terminus of amino acid residue 1069, as numbered in the above Cas9 reference sequence, or a corresponding amino acid residue in another Cas9 polypeptide. In some embodiments, the deaminase (e.g., adenosine deaminase) is inserted at the C-terminus of amino acid residue 1067 or is inserted at the C-terminus of amino acid residue 1068 or is inserted at the C-terminus of amino acid residue 1069, as numbered in the above Cas9 reference sequence, or a corresponding amino acid residue in another Cas9 polypeptide. In some embodiments, the deaminase (e.g., adenosine deaminase) is inserted to replace amino acid residue 1067, or is inserted to replace amino acid residue 1068, or is inserted to replace amino acid residue 1069, as numbered in the above Cas9 reference sequence, or a corresponding amino acid residue in another Cas9 polypeptide.

[0389] In some embodiments, the deaminase (e.g., adenosine deaminase) is inserted at amino acid residue 1246, or is inserted at amino acid residue 1247, or is inserted at amino acid residue 1248, as numbered in the above Cas9 reference sequence, or a corresponding amino acid residue in another Cas9 polypeptide. In some embodiments, the deaminase (e.g., adenosine deaminase) is inserted at the N-terminus of amino acid residue 1246 or is inserted at the N-terminus of amino acid residue 1247 or is inserted at the N-terminus of amino acid residue 1248, as numbered in the above Cas9 reference sequence, or a corresponding amino acid residue in another Cas9 polypeptide. In some embodiments, the deaminase (e.g., adenosine deaminase) is inserted at the C-terminus of amino acid residue 1246 or is inserted at the C-terminus of amino acid residue 1247 or is inserted at the C-terminus of amino acid residue 1248, as numbered in the above Cas9 reference sequence, or a corresponding amino acid residue in another Cas9 polypeptide. In some embodiments, the deaminase (e.g., adenosine deaminase) is inserted to replace amino acid residue 1246, or is inserted to replace amino acid residue 1247, or is inserted to replace amino acid residue 1248, as numbered in the above Cas9 reference sequence, or a corresponding amino acid residue in another Cas9 polypeptide.

[0390] In some embodiments, a heterologous polypeptide (e.g., deaminase) is inserted in a flexible loop of a Cas9 polypeptide. The flexible loop portions can be selected from the group consisting of 530-537, 569-570, 686-691, 943-947, 1002-1025, 1052-1077, 1232-1247, or 1298-1300 as numbered in the above Cas9 reference sequence, or a corresponding amino acid residue in another Cas9 polypeptide. The flexible loop portions can be selected from the group consisting of: 1-529, 538-568, 580-685, 692-942, 948-1001, 1026-1051, 1078-1231, or 1248-1297 as numbered in the above Cas9 reference sequence, or a corresponding amino acid residue in another Cas9 polypeptide.

[0391] A heterologous polypeptide (e.g., adenine deaminase) can be inserted into a Cas9 polypeptide region corresponding to amino acid residues: 1017-1069, 1242-1247, 1052-1056, 1060-1077, 1002-1003, 943-947, 530-537, 568-579, 686-691, 1242-1247, 1298-1300, 1066-1077, 1052-1056, or 1060-1077 as numbered in the above Cas9 reference sequence, or a corresponding amino acid residue in another Cas9 polypeptide.

[0392] A heterologous polypeptide (e.g., adenine deaminase) can be inserted in place of a deleted region of a Cas9 polypeptide. The deleted region can correspond to an N-terminal or C-terminal portion of the Cas9 polypeptide. In some embodiments, the deleted region corresponds to residues 792-872 as numbered in the above Cas9 reference sequence, or a corresponding amino acid residue in another Cas9 polypeptide. In some embodiments, the deleted region corresponds to residues 792-906 as numbered in the above Cas9 reference sequence, or a corresponding amino acid residue in another Cas9 polypeptide. In some embodiments, the deleted region corresponds to residues 2-791 as numbered in the above Cas9 reference sequence, or a corresponding amino acid residue in another Cas9 polypeptide. In some embodiments, the deleted region corresponds to residues 1017-1069 as numbered in the above Cas9 reference sequence, or corresponding amino acid residues thereof.

[0393] Exemplary internal fusions base editors are provided in Table 7A below:

TABLE 7A
Insertion loci in Cas9 proteins

| BE ID | Modification | Other ID |
|---|---|---|
| IBE001 | Cas9 TadA ins 1015 | ISLAY01 |
| IBE002 | Cas9 TadA ins 1022 | ISLAY02 |
| IBE003 | Cas9 TadA ins 1029 | ISLAY03 |
| IBE004 | Cas9 TadA ins 1040 | ISLAY04 |
| IBE005 | Cas9 TadA ins 1068 | ISLAY05 |
| IBE006 | Cas9 TadA ins 1247 | ISLAY06 |
| IBE007 | Cas9 TadA ins 1054 | ISLAY07 |
| IBE008 | Cas9 TadA ins 1026 | ISLAY08 |
| IBE009 | Cas9 TadA ins 768 | ISLAY09 |
| IBE020 | delta HNH TadA 792 | ISLAY20 |
| IBE021 | N-term fusion single TadA helix truncated 165-end | ISLAY21 |
| IBE029 | TadA-Circular Permutant116 ins1067 | ISLAY29 |
| IBE031 | TadA- Circular Permutant 136 ins1248 | ISLAY31 |
| IBE032 | TadA- Circular Permutant 136ins 1052 | ISLAY32 |
| IBE035 | delta 792-872 TadA ins | ISLAY35 |
| IBE036 | delta 792-906 TadA ins | ISLAY36 |
| IBE043 | TadA-Circular Permutant 65 ins1246 | ISLAY43 |
| IBE044 | TadA ins C-term truncate2 791 | ISLAY44 |

[0394] A heterologous polypeptide (e.g., deaminase) can be inserted within a structural or functional domain of a Cas9 polypeptide. A heterologous polypeptide (e.g., deaminase) can be inserted between two structural or functional domains of a Cas9 polypeptide. A heterologous polypeptide (e.g., deaminase) can be inserted in place of a structural or functional domain of a Cas9 polypeptide, for example, after deleting the domain from the Cas9 polypeptide. The structural or functional domains of a Cas9 polypeptide can include, for example, RuvC I, RuvC II, RuvC III, Rec1, Rec2, PI, or HNH.

[0395] In some embodiments, the Cas9 polypeptide lacks one or more domains selected from the group consisting of: RuvC I, RuvC II, RuvC III, Rec1, Rec2, PI, or HNH domain. In some embodiments, the Cas9 polypeptide lacks a nuclease domain. In some embodiments, the Cas9 polypeptide lacks an HNH domain. In some embodiments, the Cas9 polypeptide lacks a portion of the HNH domain such that the Cas9 polypeptide has reduced or abolished HNH activity. In some embodiments, the Cas9 polypeptide comprises a deletion of the nuclease domain, and the deaminase is inserted to replace the nuclease domain. In some embodiments, the HNH domain is deleted and the deaminase is inserted in its place. In some embodiments, one or more of the RuvC domains is deleted and the deaminase is inserted in its place.

[0396] A fusion protein comprising a heterologous polypeptide can be flanked by a N-terminal and a C-terminal fragment of a napDNAbp. In some embodiments, the fusion protein comprises a deaminase flanked by a N-terminal fragment and a C-terminal fragment of a Cas9 polypeptide. The N terminal fragment or the C terminal fragment can bind the target polynucleotide sequence. The C-terminus of the N terminal fragment or the N-terminus of the C terminal fragment can comprise a part of a flexible loop of a Cas9 polypeptide. The C-terminus of the N terminal fragment or the N-terminus of the C terminal fragment can comprise a part of an alpha-helix structure of the Cas9 polypeptide. The N-terminal fragment or the C-terminal fragment can comprise a DNA binding domain. The N-terminal fragment or the C-terminal fragment can comprise a RuvC domain. The N-terminal fragment or the C-terminal fragment can comprise an HNH domain. In some embodiments, neither of the N-terminal fragment and the C-terminal fragment comprises an HNH domain.

[0397] In some embodiments, the C-terminus of the N terminal Cas9 fragment comprises an amino acid that is in proximity to a target nucleobase when the fusion protein deaminates the target nucleobase. In some embodiments, the N-terminus of the C terminal Cas9 fragment comprises an amino acid that is in proximity to a target nucleobase when the fusion protein deaminates the target nucleobase. The insertion location of different deaminases can be different in order to have proximity between the target nucleobase and an amino acid in the C-terminus of the N terminal Cas9 fragment or the N-terminus of the C terminal Cas9 fragment. For example, the insertion position of an ABE can be at an amino acid residue selected from the group consisting of: 1015, 1022, 1029, 1040, 1068, 1247, 1054, 1026, 768, 1067, 1248, 1052, and 1246 as numbered in the above Cas9 reference sequence, or a corresponding amino acid residue in another Cas9 polypeptide.

[0398] The N-terminal Cas9 fragment of a fusion protein (i.e. the N-terminal Cas9 fragment flanking the deaminase in a fusion protein) can comprise the N-terminus of a Cas9 polypeptide. The N-terminal Cas9 fragment of a fusion protein can comprise a length of at least about: 100, 200, 300, 400, 500, 600, 700, 800, 900, 1000, 1100, 1200, or 1300 amino acids. The N-terminal Cas9 fragment of a fusion protein can comprise a sequence corresponding to amino acid residues: 1-56, 1-95, 1-200, 1-300, 1-400, 1-500, 1-600, 1-700, 1-718, 1-765, 1-780, 1-906, 1-918, or 1-1100 as numbered in the above Cas9 reference sequence, or a corresponding amino acid residue in another Cas9 polypeptide. The N-terminal Cas9 fragment can comprise a sequence comprising at least: 85%, at least 90%, at least 91%, at least 92%, at least 93%, at least 94%, at least 95%, at least 96%, at least 97%, at least 98%, at least 99%, or at least 99.5% sequence identity to amino acid residues: 1-56, 1-95, 1-200, 1-300, 1-400, 1-500, 1-600, 1-700, 1-718, 1-765, 1-780, 1-906, 1-918, or 1-1100 as numbered in the above Cas9 reference sequence, or a corresponding amino acid residue in another Cas9 polypeptide.

[0399] The C-terminal Cas9 fragment of a fusion protein (i.e. the C-terminal Cas9 fragment flanking the deaminase in a fusion protein) can comprise the C-terminus of a Cas9 polypeptide. The C-terminal Cas9 fragment of a fusion protein can comprise a length of at least about: 100, 200, 300, 400, 500, 600, 700, 800, 900, 1000, 1100, 1200, or 1300 amino acids. The C-terminal Cas9 fragment of a fusion protein can comprise a sequence corresponding to amino acid residues: 1099-1368, 918-1368, 906-1368, 780-1368, 765-1368, 718-1368, 94-1368, or 56-1368 as numbered in the above Cas9 reference sequence, or a corresponding amino acid residue in another Cas9 polypeptide. The N-terminal Cas9 fragment can comprise a sequence comprising at least: 85%, at least 90%, at least 91%, at least 92%, at least 93%, at least 94%, at least 95%, at least 96%, at least 97%, at least 98%, at least 99%, or at least 99.5% sequence identity to amino acid residues: 1099-1368, 918-1368, 906-1368, 780-1368, 765-1368, 718-1368, 94-1368, or 56-1368 as numbered in the above Cas9 reference sequence, or a corresponding amino acid residue in another Cas9 polypeptide.

[0400] The N-terminal Cas9 fragment and C-terminal Cas9 fragment of a fusion protein taken together may not correspond to a full-length naturally occurring Cas9 polypeptide sequence, for example, as set forth in the above Cas9 reference sequence.

[0401] The fusion protein described herein can effect targeted deamination with reduced deamination at non-target sites (e.g., off-target sites), such as reduced genome wide spurious deamination. The fusion protein described herein can effect targeted deamination with reduced bystander deamination at non-target sites. The undesired deamination or off-target deamination can be reduced by at least 30%, at least 40%, at least 50%, at least 60%, at least 70%, at least 80%, at least 90%, at least 95%, or at least 99% compared with, for example, an end terminus fusion protein comprising the deaminase fused to a N terminus or a C terminus of a Cas9 polypeptide. The undesired deamination or off-target deamination can be reduced by at least one-fold, at least two-fold, at least three-fold, at least four-fold, at least five-fold, at least tenfold, at least fifteen fold, at least twenty fold, at least thirty fold, at least forty fold, at least fifty fold, at least 60 fold, at least 70 fold, at least 80 fold, at least 90 fold, or at least hundred fold, compared with, for example, an end terminus fusion protein comprising the deaminase fused to a N terminus or a C terminus of a Cas9 polypeptide.

[0402] In some embodiments, the deaminase (e.g., adenosine deaminase) of the fusion protein deaminates no more than two nucleobases within the range of an R-loop. In some embodiments, the deaminase of the fusion protein deaminates no more than three nucleobases within the range of the R-loop. In some embodiments, the deaminase of the fusion protein deaminates no more than 2, 3, 4, 5, 6, 7, 8, 9, or 10 nucleobases within the range of the R-loop. An R-loop is a three-stranded nucleic acid structure including a DNA:RNA hybrid, a DNA:DNA or an RNA: RNA complementary structure and the associated with single-stranded DNA. As used herein, an R-loop may be formed when a target polynucleotide is contacted with a CRISPR complex or a base editing complex, wherein a portion of a guide polynucleotide, e.g. a guide RNA, hybridizes with and displaces with a portion of a target polynucleotide, e.g. a target DNA. In some embodiments, an R-loop comprises a hybridized region of a spacer sequence and a target DNA complementary sequence. An R-loop region may be of about 5, 6, 7, 8, 9, 10, 11, 12, 13, 14, 15, 16, 17, 18, 19, 20, 21, 22, 23, 24, 25, 26, 27, 28, 29, 30, 31, 32, 33, 34, 35, 36, 37, 38, 39, 40, 41, 42, 43, 44, 45, 46, 47, 48, 49, or 50 nucleobase pairs in length. In some embodiments, the R-loop region is about 20 nucleobase pairs in length. It should be understood that, as used herein, an R-loop region is not limited to the target DNA strand that hybridizes with the guide polynucleotide. For example, editing of a target nucleobase within an R-loop region may be to a DNA strand that comprises the complementary strand to a guide RNA, or may be to a DNA strand that is the opposing strand of the strand complementary to the guide RNA. In some embodiments, editing in the region of the R-loop comprises editing a nucleobase on non-complementary strand (protospacer strand) to a guide RNA in a target DNA sequence.

[0403] The fusion protein described herein can effect target deamination in an editing window different from canonical base editing. In some embodiments, a target nucleobase is from about 1 to about 20 bases upstream of a PAM sequence in the target polynucleotide sequence. In some embodiments, a target nucleobase is from about 2 to about 12 bases upstream of a PAM sequence in the target polynucleotide sequence. In some embodiments, a target nucleobase is from about 1 to 9 base pairs, about 2 to 10 base pairs, about 3 to 11 base pairs, about 4 to 12 base pairs, about 5 to 13 base pairs, about 6 to 14 base pairs, about 7 to 15 base pairs, about 8 to 16 base pairs, about 9 to 17 base pairs, about 10 to 18 base pairs, about 11 to 19 base pairs, about 12 to 20 base pairs, about 1 to 7 base pairs, about 2 to 8 base pairs, about 3 to 9 base pairs, about 4 to 10 base pairs, about 5 to 11 base pairs, about 6 to 12 base pairs, about 7 to 13 base pairs, about 8 to 14 base pairs, about 9 to 15 base pairs, about 10 to 16 base pairs, about 11 to 17 base pairs, about 12 to 18 base pairs, about 13 to 19 base pairs, about 14 to 20 base pairs, about 1 to 5 base pairs, about 2 to 6 base pairs, about 3 to 7 base pairs, about 4 to 8 base pairs, about 5 to 9 base pairs, about 6 to 10 base pairs, about 7 to 11 base pairs, about 8 to 12 base pairs, about 9 to 13 base pairs, about 10 to 14 base pairs, about 11 to 15 base pairs, about 12 to 16 base pairs, about 13 to 17 base pairs, about 14 to 18 base pairs, about 15 to 19 base pairs, about 16 to 20 base pairs, about 1 to 3 base pairs, about 2 to 4 base pairs, about 3 to 5 base pairs, about 4 to 6 base pairs, about 5 to 7 base pairs, about 6 to 8 base pairs, about 7 to 9 base pairs, about 8 to 10 base pairs, about 9 to 11 base pairs, about 10 to 12 base pairs, about 11 to 13 base pairs, about 12 to 14 base pairs, about 13 to 15 base pairs, about 14 to 16 base pairs, about 15 to 17 base pairs, about 16 to 18 base pairs, about 17 to 19 base pairs, about 18 to 20 base pairs away or upstream of the PAM sequence. In some embodiments, a target nucleobase is about 1, 2, 3, 4, 5, 6, 7, 8, 9, 10, 11, 12, 13, 14, 15, 16, 17, 18, 19, 20, or more base pairs away from or upstream of the PAM sequence. In some embodiments, a target nucleobase is about 1, 2, 3, 4, 5, 6, 7, 8, or 9 base pairs upstream of the PAM sequence. In some embodiments, a target nucleobase is about 2, 3, 4, or 6 base pairs upstream of the PAM sequence.

[0404] The fusion protein can comprise more than one heterologous polypeptide. For example, the fusion protein can additionally comprise one or more UGI domains and/or one or more nuclear localization signals. The two or more heterologous domains can be inserted in tandem. The two or more heterologous domains can be inserted at locations such that they are not in tandem in the NapDNAbp.

[0405] A fusion protein can comprise a linker between the deaminase and the napDNAbp polypeptide. The linker can be a peptide or a non-peptide linker. For example, the linker can be an XTEN, (GGGS)n, (GGGGS)n, (G)n, (EAAAK)n, (GGS)n, SGSETPGTSESATPES. In some embodiments, the fusion protein comprises a linker between the N-terminal Cas9 fragment and the deaminase. In some embodiments, the fusion protein comprises a linker between the C-terminal Cas9 fragment and the deaminase. In some embodiments, the N-terminal and C-terminal fragments of napDNAbp are connected to the deaminase with a linker. In some embodiments, the N-terminal and C-terminal fragments are joined to the deaminase domain without a linker. In some embodiments, the fusion protein comprises a linker between the N-terminal Cas9 fragment and the deaminase, but does not comprise a linker between the C-terminal Cas9 fragment and the deaminase. In some embodiments, the fusion protein comprises a linker between the C-terminal Cas9 fragment and the deaminase, but does not comprise a linker between the N-terminal Cas9 fragment and the deaminase.

[0406] In some embodiments, the napDNAbp in the fusion protein is a Cas12 polypeptide, e.g., Cas12b/C2c1, or a fragment thereof. The Cas12 polypeptide can be a variant Cas12 polypeptide. In other embodiments, the N- or C-terminal fragments of the Cas12 polypeptide comprise a nucleic acid programmable DNA binding domain or a RuvC domain. In other embodiments, the fusion protein contains a linker between the Cas12 polypeptide and the catalytic domain. In other embodiments, the amino acid sequence of the linker is GGSGGS or GSSGSETPGTSESATPESSG. In other embodiments, the linker is a rigid linker. In other embodiments of the above aspects, the linker is encoded by GGAGGCTCTGGAGGAAGC or GGCTCTTCTGGATCTGAAACACCTGGCACAAGCGAGAGCGCCACCCCTGAGAGCTCTGGC.

[0407] Fusion proteins comprising a heterologous catalytic domain flanked by N- and C-terminal fragments of a Cas12 polypeptide are also useful for base editing in the methods as described herein. Fusion proteins comprising Cas12 and one or more deaminase domains, e.g., adenosine deaminase, or comprising an adenosine deaminase domain flanked by Cas12 sequences are also useful for highly specific and efficient base editing of target sequences. In an embodiment, a chimeric Cas12 fusion protein contains a heterologous catalytic domain (e.g., adenosine deaminase) inserted within a Cas12 polypeptide. In some embodiments, the fusion protein comprises an adenosine deaminase domain and an adenosine deaminase domain inserted within a Cas12. In some embodiments, an adenosine deaminase is fused within Cas12 and an adenosine deaminase is fused to the C-terminus. In some embodiments, an adenosine deaminase is fused within Cas12 and an adenosine deaminase fused to the N-terminus. In some embodiments, an adenosine deaminase is fused within Cas12 and an adenosine deaminase is fused to the C-terminus. In some embodiments, an adenosine deaminase is fused within Cas12 and an adenosine deaminase fused to the N-terminus. Exemplary structures of a fusion protein with an adenosine deaminase and an adenosine deaminase and a Cas12 are provided as follows: NH2-[Cas12(adenosine deaminase)]-[adenosine deaminase]-COOH; NH2-[adenosine deaminase]-[Cas12(adenosine deaminase)]-COOH; NH2-[Cas12(adenosine deaminase)]-[adenosine deaminase]-COOH; or NH2-[adenosine deaminase]-[Cas12(adenosine deaminase)]-COOH;

[0408] In some embodiments, the “-” used in the general architecture above indicates the presence of an optional linker.

[0409] In various embodiments, the catalytic domain has DNA modifying activity (e.g., deaminase activity), such as adenosine deaminase activity. In some embodiments, the adenosine deaminase is a TadA (e.g., TadA7.10). In some embodiments, the TadA is a TadA*8. In some embodiments, a TadA*8 is fused within Cas12 and an adenosine deaminase is fused to the C-terminus. In some embodiments, a TadA*8 is fused within Cas12 and an adenosine deaminase fused to the N-terminus. In some embodiments, an adenosine deaminase is fused within Cas12 and a TadA*8 is fused to the C-terminus. In some embodiments, an adenosine deaminase is fused within Cas12 and a TadA*8 fused to the N-terminus. Exemplary structures of a fusion protein with a TadA*8 and an adenosine deaminase and a Cas12 are provided as follows: N-[Cas12(TadA*8)]-[adenosine deaminase]-C; N-[adenosine deaminase]-[Cas12(TadA*8)]-C; N-[Cas12(adenosine deaminase)]-[TadA*8]-C; or N-[TadA*8]-[Cas12(adenosine deaminase)]-C.

[0410] In some embodiments, the “-” used in the general architecture above indicates the presence of an optional linker.

[0411] In other embodiments, the fusion protein contains one or more catalytic domains. In other embodiments, at least one of the one or more catalytic domains is inserted within the Cas12 polypeptide or is fused at the Cas12 N-terminus or C-terminus. In other embodiments, at least one of the one or more catalytic domains is inserted within a loop, an alpha helix region, an unstructured portion, or a solvent accessible portion of the Cas12 polypeptide. In other embodiments, the Cas12 polypeptide is Cas12a, Cas12b, Cas12c, Cas12d, Cas12e, Cas12g, Cas12h, or Cas12i. In other embodiments, the Cas12 polypeptide has at least about 85% amino acid sequence identity to Bacillus hisashii Cas12b, Bacillus thermoamylovorans Cas12b, Bacillus sp. V3-13 Cas12b, or Alicyclobacillus acidiphilus Cas12b. In other embodiments, the Cas12 polypeptide has at least about 90% amino acid sequence identity to Bacillus hisashii Cas12b, Bacillus thermoamylovorans Cas12b, Bacillus sp. V3-13 Cas12b, or Alicyclobacillus acidiphilus Cas12b. In other embodiments, the Cas12 polypeptide has at least about 95% amino acid sequence identity to Bacillus hisashii Cas12b, Bacillus thermoamylovorans Cas12b, Bacillus sp. V3-13 Cas12b, or Alicyclobacillus acidiphilus Cas12b. In other embodiments, the Cas12 polypeptide contains or consists essentially of a fragment of Bacillus hisashii Cas12b, Bacillus thermoamylovorans Cas12b, Bacillus sp. 173-13 Cas12b, or Alicyclobacillus acidiphilus Cas12b.

[0412] In other embodiments, the catalytic domain is inserted between amino acid positions 153-154, 255-256, 306-307, 980-981, 1019-1020, 534-535, 604-605, or 344-345 of BhCas12b or a corresponding amino acid residue of Cas12a, Cas12c, Cas12d, Cas12e, Cas12g, Cas12h, or Cas12i. In other embodiments, the catalytic domain is inserted between amino acids P153 and S154 of BhCas12b. In other embodiments, the catalytic domain is inserted between amino acids K255 and E256 of BhCas12b. In other embodiments, the catalytic domain is inserted between amino acids D980 and G981 of BhCas12b. In other embodiments, the catalytic domain is inserted between amino acids K1019 and L1020 of BhCas12b. In other embodiments, the catalytic domain is inserted between amino acids F534 and P535 of BhCas12b. In other embodiments, the catalytic domain is inserted between amino acids K604 and G605 of BhCas12b. In other embodiments, the catalytic domain is inserted between amino acids H344 and F345 of BhCas12b. In other embodiments, catalytic domain is inserted between amino acid positions 147 and 148, 248 and 249, 299 and 300, 991 and 992, or 1031 and 1032 of BvCas12b or a corresponding amino acid residue of Cas12a, Cas12c, Cas12d, Cas12e, Cas12g, Cas12h, or Cas12i. In other embodiments, the catalytic domain is inserted between amino acids P147 and D148 of BvCas12b. In other embodiments, the catalytic domain is inserted between amino acids G248 and G249 of BvCas12b. In other embodiments, the catalytic domain is inserted between amino acids P299 and E300 of BvCas12b. In other embodiments, the catalytic domain is inserted between amino acids G991 and E992 of BvCas12b. In other embodiments, the catalytic domain is inserted between amino acids K1031 and M1032 of BvCas12b. In other embodiments, the catalytic domain is inserted between amino acid positions 157 and 158, 258 and 259, 310 and 311, 1008 and 1009, or 1044 and 1045 of AaCas12b or a corresponding amino acid residue of Cas12a, Cas12c, Cas12d, Cas12e, Cas12g, Cas12h, or Cas12i. In other embodiments, the catalytic domain is inserted between amino acids P157 and G158 of AaCas12b. In other embodiments, the catalytic domain is inserted between amino acids V258 and G259 of AaCas12b. In other embodiments, the catalytic domain is inserted between amino acids D310 and P311 of AaCas12b. In other embodiments, the catalytic domain is inserted between amino acids G1008 and E1009 of AaCas12b. In other embodiments, the catalytic domain is inserted between amino acids G1044 and K1045 at of AaCas12b.

[0413] In other embodiments, the fusion protein contains a nuclear localization signal (e.g., a bipartite nuclear localization signal). In other embodiments, the amino acid sequence of the nuclear localization signal is MAPKKKRKVGIHGVPAA. In other embodiments of the above aspects, the nuclear localization signal is encoded by the following sequence:

[0414] ATGGCCCCAAAGAAGAAGCGGAAGGTCGGTATCCACGGAGTCCCAGCAGCC. In other embodiments, the Cas12b polypeptide contains a mutation that silences the catalytic activity of a RuvC domain. In other embodiments, the Cas12b polypeptide contains D574A, D829A and/or D952A mutations. In other embodiments, the fusion protein further contains a tag (e.g., an influenza hemagglutinin tag).

[0415] In some embodiments, the fusion protein comprises a napDNAbp domain (e.g., Cas12-derived domain) with an internally fused nucleobase editing domain (e.g., all or a portion of a deaminase domain, e.g., an adenosine deaminase domain). In some embodiments, the napDNAbp is a Cas12b. In some embodiments, the base editor comprises a BhCas12b domain with an internally fused TadA*8 domain inserted at the loci provided in Table 7B below.

TABLE 7B
Insertion loci in Cas12b proteins

| | Insertion site | Inserted between aa |
|---|---|---|
| BhCas12b | | |
| position 1 | 153 | PS |
| position 2 | 255 | KE |
| position 3 | 306 | DE |
| position 4 | 980 | DG |
| position 5 | 1019 | KL |
| position 6 | 534 | FP |
| position 7 | 604 | KG |
| position 8 | 344 | HF |
| BvCas12b | | |
| position 1 | 147 | PD |
| position 2 | 248 | GG |
| position 3 | 299 | PE |
| position 4 | 991 | GE |
| position 5 | 1031 | KM |
| AaCas12b | | |
| position 1 | 157 | PG |
| position 2 | 258 | VG |
| position 3 | 310 | DP |
| position 4 | 1008 | GE |
| position 5 | 1044 | GK |

[0416] By way of nonlimiting example, an adenosine deaminase (e.g., ABE8.13) may be inserted into a BhCas12b to produce a fusion protein (e.g., ABE8.13-BhCas12b) that effectively edits a nucleic acid sequence.

[0417] In some embodiments, the base editing system described herein comprises an ABE with TadA inserted into a Cas9. Sequences of relevant ABEs with TadA inserted into a Cas9 are provided.

101 Cas9 TadAins 1015
MDKKYSIGLAIGTNSVGWAVITDEYKVPSKKFKVLGNTDRHSIKKNLIGA
LLFDSGETAEATRLKRTARRRYTRRKNRICYLQEIFSNEMAKVDDSFFHR
LEESFLVEEDKKHERHPIFGNIVDEVAYHEKYPTIYHLRKKLVDSTDKAD
LRLIYLALAHMIKFRGHFLIEGDLNPDNSDVDKLFIQLVQTYNQLFEENP
INASGVDAKAILSARLSKSRRLENLIAQLPGEKKNGLFGNLIALSLGLTP
NFKSNFDLAEDAKLQLSKDTYDDDLDNLLAQIGDQYADLFLAAKNLSDAI
LLSDILRVNTEITKAPLSASMIKRYDEHHQDLTLLKALVRQQLPEKYKEI
FFDQSKNGYAGYIDGGASQEEFYKFIKPILEKMDGTEELLVKLNREDLLR
KQRTFDNGSIPHQIHLGELHAILRRQEDFYPFLKDNREKIEKILTFRIPY
YVGPLARGNSRFAWMTRKSEETITPWNFEEVVDKGASAQSFIERMTNFDK
NLPNEKVLPKHSLLYEYFTVYNELTKVKYVTEGMRKPAFLSGEQKKAIVD
LLFKTNRKVTVKQLKEDYFKKIECFDSVEISGVEDRFNASLGTYHDLLKI
IKDKDFLDNEENEDILEDIVLTLTLFEDREMIEERLKTYAHLFDDKVMKQ
LKRRRYTGWGRLSRKLINGIRDKQSGKTILDFLKSDGFANRNFMQLIHDD
SLTFKEDIQKAQVSGQGDSLHEHIANLAGSPAIKKGILQTVKVVDELVKV
MGRHKPENIVIEMARENQTTQKGQKNSRERMKRIEEGIKELGSQILKEHP
VENTQLQNEKLYLYYLQNGRDMYVDQELDINRLSDYDVDHIVPQSFLKDD
SIDNKVLTRSDKNRGKSDNVPSEEVVKKMKNYWRQLLNAKLITQRKFDNL
TKAERGGLSELDKAGFIKRQLVETRQITKHVAQILDSRMNTKYDENDKLI
REVKVITLKSKLVSDFRKDFQFYKVREINNYHHAHDAYLNAVVGTALIKK
YPKLESEFVYGDYKVGSSGSETPGTSESATPESSGSEVEFSHEYWMRHAL
TLAKRARDEREVPVGAVLVLNNRVIGEGWNRAIGLHDPTAHAEIMALRQG
GLVMQNYRLIDATLYVTFEPCVMCAGAMIHSRIGRVVFGVRNAKTGAAGS
LMDVLHYPGMNHRVEITEGILADECAALLCYFFRMPRQVFNAQKKAQSST
DYDVRKMIAKSEQEIGKATAKYFFYSNIMNFFKTEITLANGEIRKRPLIE
TNGETGEIVWDKGRDFATVRKVLSMPQVNIVKKTEVQTGGFSKESILPKR
NSDKLIARKKDWDPKKYGGFDSPTVAYSVLVVAKVEKGKSKKLKSVKELL
GITIMERSSFEKNPIDFLEAKGYKEVKKDLIIKLPKYSLEELENGRKRML
ASAGELQKGNELALPSKYVNFLYLASHYEKLKGSPEDNEQKQLFVEQHKH
YLDEIIEQISEFSKRVILADANLDKVLSAYNKHRDKPIREQAENIIHLET
LTNLGAPAAFKYFDTTIDRKRYTSTKEVLDATLIHQSITGLYETRIDLSQ
LGGD
102 Cas9 TadAins 1022
MDKKYSIGLAIGTNSVGWAVITDEYKVPSKKFKVLGNTDRHSIKKNLIGA
LLFDSGETAEATRLKRTARRRYTRRKNRICYLQEIFSNEMAKVDDSFFHR
LEESFLVEEDKKHERHPIFGNIVDEVAYHEKYPTIYHLRKKLVDSTDKAD
LRLIYLALAHMIKFRGHFLIEGDLNPDNSDVDKLFIQLVQTYNQLFEENP
INASGVDAKAILSARLSKSRRLENLIAQLPGEKKNGLFGNLIALSLGLTP
NFKSNFDLAEDAKLQLSKDTYDDDLDNLLAQIGDQYADLFLAAKNLSDAI
LLSDILRVNTEITKAPLSASMIKRYDEHHQDLTLLKALVRQQLPEKYKEI
FFDQSKNGYAGYIDGGASQEEFYKFIKPILEKMDGTEELLVKLNREDLLR
KQRTFDNGSIPHQIHLGELHAILRRQEDFYPFLKDNREKIEKILTFRIPY
YVGPLARGNSRFAWMTRKSEETITPWNFEEVVDKGASAQSFIERMTNFDK
NLPNEKVLPKHSLLYEYFTVYNELTKVKYVTEGMRKPAFLSGEQKKAIVD
LLFKTNRKVTVKQLKEDYFKKIECFDSVEISGVEDRFNASLGTYHDLLKI
IKDKDFLDNEENEDILEDIVLTLTLFEDREMIEERLKTYAHLFDDKVMKQ
LKRRRYTGWGRLSRKLINGIRDKQSGKTILDFLKSDGFANRNFMQLIHDD
SLTFKEDIQKAQVSGQGDSLHEHIANLAGSPAIKKGILQTVKVVDELVKV
MGRHKPENIVIEMARENQTTQKGQKNSRERMKRIEEGIKELGSQILKEHP
VENTQLQNEKLYLYYLQNGRDMYVDQELDINRLSDYDVDHIVPQSFLKDD
SIDNKVLTRSDKNRGKSDNVPSEEVVKKMKNYWRQLLNAKLITQRKFDNL
TKAERGGLSELDKAGFIKRQLVETRQITKHVAQILDSRMNTKYDENDKLI
REVKVITLKSKLVSDFRKDFQFYKVREINNYHHAHDAYLNAVVGTALIKK
YPKLESEFVYGDYKVYDVRKMIGSSGSETPGTSESATPESSGSEVEFSHE
YWMRHALTLAKRARDEREVPVGAVLVLNNRVIGEGWNRAIGLHDPTAHAE
IMALRQGGLVMQNYRLIDATLYVTFEPCVMCAGAMIHSRIGRVVFGVRNA
KTGAAGSLMDVLHYPGMNHRVEITEGILADECAALLCYFFRMPRQVFNAQ
KKAQSSTDAKSEQEIGKATAKYFFYSNIMNFFKTEITLANGEIRKRPLIE
TNGETGEIVWDKGRDFATVRKVLSMPQVNIVKKTEVQTGGFSKESILPKR
NSDKLIARKKDWDPKKYGGFDSPTVAYSVLVVAKVEKGKSKKLKSVKELL
GITIMERSSFEKNPIDFLEAKGYKEVKKDLIIKLPKYSLFELENGRKRML
ASAGELQKGNELALPSKYVNFLYLASHYEKLKGSPEDNEQKQLFVEQHKH
YLDEIIEQISEFSKRVILADANLDKVLSAYNKHRDKPIREQAENIIHLET
LTNLGAPAAFKYFDTTIDRKRYTSTKEVLDATLIHQSITGLYETRIDLSQ
LGGD
103 Cas9 TadAins 1029
MDKKYSIGLAIGTNSVGWAVITDEYKVPSKKFKVLGNTDRHSIKKNLIGA
LLFDSGETAEATRLKRTARRRYTRRKNRICYLQEIFSNEMAKVDDSFFHR
LEESFLVEEDKKHERHPIFGNIVDEVAYHEKYPTIYHLRKKLVDSTDKAD
LRLIYLALAHMIKFRGHFLIEGDLNPDNSDVDKLFIQLVQTYNQLFEENP
INASGVDAKAILSARLSKSRRLENLIAQLPGEKKNGLFGNLIALSLGLTP
NFKSNFDLAEDAKLQLSKDTYDDDLDNLLAQIGDQYADLFLAAKNLSDAI
LLSDILRVNTEITKAPLSASMIKRYDEHHQDLTLLKALVRQQLPEKYKEI
FFDQSKNGYAGYIDGGASQEEFYKFIKPILEKMDGTEELLVKLNREDLLR
KQRTFDNGSIPHQIHLGELHAILRRQEDFYPFLKDNREKIEKILTFRIPY
YVGPLARGNSRFAWMTRKSEETITPWNFEEVVDKGASAQSFIERMTNFDK
NLPNEKVLPKHSLLYEYFTVYNELTKVKYVTEGMRKPAFLSGEQKKAIVD
LLFKTNRKVTVKQLKEDYFKKIECFDSVEISGVEDRFNASLGTYHDLLKI
IKDKDFLDNEENEDILEDIVLTLTLFEDREMIEERLKTYAHLFDDKVMKQ
LKRRRYTGWGRLSRKLINGIRDKQSGKTILDFLKSDGFANRNFMQLIHDD
SLTFKEDIQKAQVSGQGDSLHEHIANLAGSPAIKKGILQTVKVVDELVKV
MGRHKPENIVIEMARENQTTQKGQKNSRERMKRIEEGIKELGSQILKEHP
VENTQLQNEKLYLYYLQNGRDMYVDQELDINRLSDYDVDHIVPQSFLKDD
SIDNKVLTRSDKNRGKSDNVPSEEVVKKMKNYWRQLLNAKLITQRKFDNL
TKAERGGLSELDKAGFIKRQLVETRQITKHVAQILDSRMNTKYDENDKLI
REVKVITLKSKLVSDFRKDFQFYKVREINNYHHAHDAYLNAVVGTALIKK
YPKLESEFVYGDYKVYDVRKMIAKSEQEIGSSGSETPGTSESATPESSGS
EVEFSHEYWMRHALTLAKRARDEREVPVGAVLVLNNRVIGEGWNRAIGLH
DPTAHAEIMALRQGGLVMQNYRLIDATLYVTFEPCVMCAGAMIHSRIGRV
VFGVRNAKTGAAGSLMDVLHYPGMNHRVEITEGILADECAALLCYFFRMP
RQVFNAQKKAQSSTDGKATAKYFFYSNIMNFFKTEITLANGEIRKRPLIE
TNGETGEIVWDKGRDFATVRKVLSMPQVNIVKKTEVQTGGFSKESILPKR
NSDKLIARKKDWDPKKYGGFDSPTVAYSVLVVAKVEKGKSKKLKSVKELL
GITIMERSSFEKNPIDFLEAKGYKEVKKDLIIKLPKYSLFELENGRKRML
ASAGELQKGNELALPSKYVNFLYLASHYEKLKGSPEDNEQKQLFVEQHKH
YLDEIIEQISEFSKRVILADANLDKVLSAYNKHRDKPIREQAENIIHLET
LTNLGAPAAFKYFDTTIDRKRYTSTKEVLDATLIHQSITGLYETRIDLSQ
LGGD
103 Cas9 TadAins 1040
MDKKYSIGLAIGTNSVGWAVITDEYKVPSKKFKVLGNTDRHSIKKNLIGA
LLFDSGETAEATRLKRTARRRYTRRKNRICYLQEIFSNEMAKVDDSFFHR
LEESFLVEEDKKHERHPIFGNIVDEVAYHEKYPTIYHLRKKLVDSTDKAD
LRLIYLALAHMIKFRGHFLIEGDLNPDNSDVDKLFIQLVQTYNQLFEENP
INASGVDAKAILSARLSKSRRLENLIAQLPGEKKNGLFGNLIALSLGLTP
NFKSNFDLAEDAKLQLSKDTYDDDLDNLLAQIGDQYADLFLAAKNLSDAI
LLSDILRVNTEITKAPLSASMIKRYDEHHQDLTLLKALVRQQLPEKYKEI
FFDQSKNGYAGYIDGGASQEEFYKFIKPILEKMDGTEELLVKLNREDLLR
KQRTFDNGSIPHQIHLGELHAILRRQEDFYPFLKDNREKIEKILTFRIPY
YVGPLARGNSRFAWMTRKSEETITPWNFEEVVDKGASAQSFIERMTNFDK
NLPNEKVLPKHSLLYEYFTVYNELTKVKYVTEGMRKPAFLSGEQKKAIVD
LLFKTNRKVTVKQLKEDYFKKIECFDSVEISGVEDRFNASLGTYHDLLKI
IKDKDFLDNEENEDILEDIVLTLTLFEDREMIEERLKTYAHLFDDKVMKQ
LKRRRYTGWGRLSRKLINGIRDKQSGKTILDFLKSDGFANRNFMQLIHDD
SLTFKEDIQKAQVSGQGDSLHEHIANLAGSPAIKKGILQTVKVVDELVKV
MGRHKPENIVIEMARENQTTQKGQKNSRERMKRIEEGIKELGSQILKEHP
VENTQLQNEKLYLYYLQNGRDMYVDQELDINRLSDYDVDHIVPQSFLKDD
SIDNKVLTRSDKNRGKSDNVPSEEVVKKMKNYWRQLLNAKLITQRKFDNL
TKAERGGLSELDKAGFIKRQLVETRQITKHVAQILDSRMNTKYDENDKLI
REVKVITLKSKLVSDFRKDFQFYKVREINNYHHAHDAYLNAVVGTALIKK
YPKLESEFVYGDYKVYDVRKMIAKSEQEIGKATAKYFFYSGSSGSETPGT
SESATPESSGSEVEESHEYWMRHALTLAKRARDEREVPVGAVLVLNNRVI
GEGWNRAIGLHDPTAHAEIMALRQGGLVMQNYRLIDATLYVTEEPCVMCA
GAMIHSRIGRVVFGVRNAKTGAAGSLMDVLHYPGMNHRVEITEGILADEC
AALLCYFFRMPRQVFNAQKKAQSSTDNIMNFFKTEITLANGEIRKRPLIE
TNGETGEIVWDKGRDFATVRKVLSMPQVNIVKKTEVQTGGFSKESILPKR
NSDKLIARKKDWDPKKYGGFDSPTVAYSVLVVAKVEKGKSKKLKSVKELL
GITIMERSSFEKNPIDFLEAKGYKEVKKDLIIKLPKYSLEELENGRKRML
ASAGELQKGNELALPSKYVNFLYLASHYEKLKGSPEDNEQKQLFVEQHKH
YLDEIIEQISEFSKRVILADANLDKVLSAYNKHRDKPIREQAENIIHLET
LTNLGAPAAFKYFDTTIDRKRYTSTKEVLDATLIHQSITGLYETRIDLSQ
LGGD
105 Cas9 TadAins 1068
MDKKYSIGLAIGTNSVGWAVITDEYKVPSKKFKVLGNTDRHSIKKNLIGA
LLFDSGETAEATRLKRTARRRYTRRKNRICYLQEIFSNEMAKVDDSFFHR
LEESFLVEEDKKHERHPIFGNIVDEVAYHEKYPTIYHLRKKLVDSTDKAD
LRLIYLALAHMIKFRGHFLIEGDLNPDNSDVDKLFIQLVQTYNQLFEENP
INASGVDAKAILSARLSKSRRLENLIAQLPGEKKNGLFGNLIALSLGLTP
NFKSNFDLAEDAKLQLSKDTYDDDLDNLLAQIGDQYADLFLAAKNLSDAI
LLSDILRVNTEITKAPLSASMIKRYDEHHQDLTLLKALVRQQLPEKYKEI
FFDQSKNGYAGYIDGGASQEEFYKFIKPILEKMDGTEELLVKLNREDLLR
KQRTFDNGSIPHQIHLGELHAILRRQEDFYPFLKDNREKIEKILTFRIPY
YVGPLARGNSRFAWMTRKSEETITPWNFEEVVDKGASAQSFIERMTNFDK
NLPNEKVLPKHSLLYEYFTVYNELTKVKYVTEGMRKPAFLSGEQKKAIVD
LLFKTNRKVTVKQLKEDYFKKIECFDSVEISGVEDRFNASLGTYHDLLKI
IKDKDFLDNEENEDILEDIVLTLTLFEDREMIEERLKTYAHLFDDKVMKQ
LKRRRYTGWGRLSRKLINGIRDKQSGKTILDFLKSDGFANRNFMQLIHDD
SLTFKEDIQKAQVSGQGDSLHEHIANLAGSPAIKKGILQTVKVVDELVKV
MGRHKPENIVIEMARENQTTQKGQKNSRERMKRIEEGIKELGSQILKEHP
VENTQLQNEKLYLYYLQNGRDMYVDQELDINRLSDYDVDHIVPQSFLKDD
SIDNKVLTRSDKNRGKSDNVPSEEVVKKMKNYWRQLLNAKLITQRKFDNL
TKAERGGLSELDKAGFIKRQLVETRQITKHVAQILDSRMNTKYDENDKLI
REVKVITLKSKLVSDFRKDFQFYKVREINNYHHAHDAYLNAVVGTALIKK
YPKLESEFVYGDYKVYDVRKMIAKSEQEIGKATAKYFFYSNIMNFFKTEI
TLANGEIRKRPLIETNGEGSSGSETPGTSESATPESSGSEVEFSHEYWMR
HALTLAKRARDEREVPVGAVLVLNNRVIGEGWNRAIGLHDPTAHAEIMAL
RQGGLVMQNYRLIDATLYVTFEPCVMCAGAMIHSRIGRVVFGVRNAKTGA
AGSLMDVLHYPGMNHRVEITEGILADECAALLCYFFRMPRQVFNAQKKAQ
SSTDTGEIVWDKGRDFATVRKVLSMPQVNIVKKTEVQTGGFSKESILPKR
NSDKLIARKKDWDPKKYGGFDSPTVAYSVLVVAKVEKGKSKKLKSVKELL
GITIMERSSFEKNPIDFLEAKGYKEVKKDLIIKLPKYSLFELENGRKRML
ASAGELQKGNELALPSKYVNFLYLASHYEKLKGSPEDNEQKQLFVEQHKH
YLDEIIEQISEFSKRVILADANLDKVLSAYNKHRDKPIREQAENIIHLET
LTNLGAPAAFKYFDTTIDRKRYTSTKEVLDATLIHQSITGLYETRIDLSQ
LGGD
106 Cas9 TadAins 1247
MDKKYSIGLAIGTNSVGWAVITDEYKVPSKKFKVLGNTDRHSIKKNLIGA
LLFDSGETAEATRLKRTARRRYTRRKNRICYLQEIFSNEMAKVDDSFFHR
LEESFLVEEDKKHERHPIFGNIVDEVAYHEKYPTIYHLRKKLVDSTDKAD
LRLIYLALAHMIKFRGHFLIEGDLNPDNSDVDKLFIQLVQTYNQLFEENP
INASGVDAKAILSARLSKSRRLENLIAQLPGEKKNGLFGNLIALSLGLTP
NFKSNFDLAEDAKLQLSKDTYDDDLDNLLAQIGDQYADLFLAAKNLSDAI
LLSDILRVNTEITKAPLSASMIKRYDEHHQDLTLLKALVRQQLPEKYKEI
FFDQSKNGYAGYIDGGASQEEFYKFIKPILEKMDGTEELLVKLNREDLLR
KQRTFDNGSIPHQIHLGELHAILRRQEDFYPFLKDNREKIEKILTFRIPY
YVGPLARGNSRFAWMTRKSEETITPWNFEEVVDKGASAQSFIERMTNFDK
NLPNEKVLPKHSLLYEYFTVYNELTKVKYVTEGMRKPAFLSGEQKKAIVD
LLFKTNRKVTVKQLKEDYFKKIECFDSVEISGVEDRFNASLGTYHDLLKI
IKDKDFLDNEENEDILEDIVLTLTLFEDREMIEERLKTYAHLFDDKVMKQ
LKRRRYTGWGRLSRKLINGIRDKQSGKTILDFLKSDGFANRNFMQLIHDD
SLTFKEDIQKAQVSGQGDSLHEHIANLAGSPAIKKGILQTVKVVDELVKV
MGRHKPENIVIEMARENQTTQKGQKNSRERMKRIEEGIKELGSQILKEHP
VENTQLQNEKLYLYYLQNGRDMYVDQELDINRLSDYDVDHIVPQSFLKDD
SIDNKVLTRSDKNRGKSDNVPSEEVVKKMKNYWRQLLNAKLITQRKFDNL
TKAERGGLSELDKAGFIKRQLVETRQITKHVAQILDSRMNTKYDENDKLI
REVKVITLKSKLVSDFRKDFQFYKVREINNYHHAHDAYLNAVVGTALIKK
YPKLESEFVYGDYKVYDVRKMIAKSEQEIGKATAKYFFYSNIMNFFKTEI
TLANGEIRKRPLIETNGETGEIVWDKGRDFATVRKVLSMPQVNIVKKTEV
QTGGFSKESILPKRNSDKLIARKKDWDPKKYGGFDSPTVAYSVLVVAKVE
KGKSKKLKSVKELLGITIMERSSFEKNPIDFLEAKGYKEVKKDLIIKLPK
YSLFELENGRKRMLASAGELQKGNELALPSKYVNFLYLASHYEKLKGGSS
GSETPGTSESATPESSGSEVEFSHEYWMRHALTLAKRARDEREVPVGAVL
VLNNRVIGEGWNRAIGLHDPTAHAEIMALRQGGLVMQNYRLIDATLYVTF
EPCVMCAGAMIHSRIGRVVFGVRNAKTGAAGSLMDVLHYPGMNHRVEITE
GILADECAALLCYFFRMPRQVFNAQKKAQSSTDSPEDNEQKQLFVEQHKH
YLDEIIEQISEFSKRVILADANLDKVLSAYNKHRDKPIREQAENIIHLET
LTNLGAPAAFKYFDTTIDRKRYTSTKEVLDATLIHQSITGLYETRIDLSQ
LGGD
107 Cas9 TadAins 1054
MDKKYSIGLAIGTNSVGWAVITDEYKVPSKKFKVLGNTDRHSIKKNLIGA
LLFDSGETAEATRLKRTARRRYTRRKNRICYLQEIFSNEMAKVDDSEFHR
LEESFLVEEDKKHERHPIFGNIVDEVAYHEKYPTIYHLRKKLVDSTDKAD
LRLIYLALAHMIKFRGHFLIEGDLNPDNSDVDKLFIQLVQTYNQLFEENP
INASGVDAKAILSARLSKSRRLENLIAQLPGEKKNGLFGNLIALSLGLTP
NFKSNFDLAEDAKLQLSKDTYDDDLDNLLAQIGDQYADLFLAAKNLSDAI
LLSDILRVNTEITKAPLSASMIKRYDEHHQDLTLLKALVRQQLPEKYKEI
FFDQSKNGYAGYIDGGASQEEFYKFIKPILEKMDGTEELLVKLNREDLLR
KQRTFDNGSIPHQIHLGELHAILRRQEDFYPFLKDNREKIEKILTFRIPY
YVGPLARGNSRFAWMTRKSEETITPWNFEEVVDKGASAQSFIERMTNFDK
NLPNEKVLPKHSLLYEYFTVYNELTKVKYVTEGMRKPAFLSGEQKKAIVD
LLFKTNRKVTVKQLKEDYFKKIECFDSVEISGVEDRFNASLGTYHDLLKI
IKDKDFLDNEENEDILEDIVLTLTLFEDREMIEERLKTYAHLFDDKVMKQ
LKRRRYTGWGRLSRKLINGIRDKQSGKTILDFLKSDGFANRNFMQLIHDD
SLTFKEDIQKAQVSGQGDSLHEHIANLAGSPAIKKGILQTVKVVDELVKV
MGRHKPENIVIEMARENQTTQKGQKNSRERMKRIEEGIKELGSQILKEHP
VENTQLQNEKLYLYYLQNGRDMYVDQELDINRLSDYDVDHIVPQSFLKDD
SIDNKVLTRSDKNRGKSDNVPSEEVVKKMKNYWRQLLNAKLITQRKFDNL
TKAERGGLSELDKAGFIKRQLVETRQITKHVAQILDSRMNTKYDENDKLI
REVKVITLKSKLVSDFRKDFQFYKVREINNYHHAHDAYLNAVVGTALIKK
YPKLESEFVYGDYKVYDVRKMIAKSEQEIGKATAKYFFYSNIMNFFKTEI
TLANGSSGSETPGTSESATPESSGSEVEFSHEYWMRHALTLAKRARDERE
VPVGAVLVLNNRVIGEGWNRAIGLHDPTAHAEIMALRQGGLVMQNYRLID
ATLYVTFEPCVMCAGAMIHSRIGRVVFGVRNAKTGAAGSLMDVLHYPGMN
HRVEITEGILADECAALLCYFFRMPRQVFNAQKKAQSSTDGEIRKRPLIE
TNGETGEIVWDKGRDFATVRKVLSMPQVNIVKKTEVQTGGFSKESILPKR
NSDKLIARKKDWDPKKYGGFDSPTVAYSVLVVAKVEKGKSKKLKSVKELL
GITIMERSSFEKNPIDFLEAKGYKEVKKDLIIKLPKYSLEELENGRKRML
ASAGELQKGNELALPSKYVNFLYLASHYEKLKGSPEDNEQKQLFVEQHKH
YLDEIIEQISEFSKRVILADANLDKVLSAYNKHRDKPIREQAENIIHLET
LTNLGAPAAFKYFDTTIDRKRYTSTKEVLDATLIHQSITGLYETRIDLSQ
LGGD
108 Cas9 TadAins 1026
MDKKYSIGLAIGTNSVGWAVITDEYKVPSKKFKVLGNTDRHSIKKNLIGA
LLEDSGETAEATRLKRTARRRYTRRKNRICYLQEIESNEMAKVDDSEEHR
LEESFLVEEDKKHERHPIFGNIVDEVAYHEKYPTIYHLRKKLVDSTDKAD
LRLIYLALAHMIKFRGHFLIEGDLNPDNSDVDKLFIQLVQTYNQLFEENP
INASGVDAKAILSARLSKSRRLENLIAQLPGEKKNGLFGNLIALSLGLTP
NFKSNFDLAEDAKLQLSKDTYDDDLDNLLAQIGDQYADLFLAAKNLSDAI
LLSDILRVNTEITKAPLSASMIKRYDEHHQDLTLLKALVRQQLPEKYKEI
FFDQSKNGYAGYIDGGASQEEFYKFIKPILEKMDGTEELLVKLNREDLLR
KQRTFDNGSIPHQIHLGELHAILRRQEDFYPFLKDNREKIEKILTFRIPY
YVGPLARGNSRFAWMTRKSEETITPWNFEEVVDKGASAQSFIERMTNFDK
NLPNEKVLPKHSLLYEYFTVYNELTKVKYVTEGMRKPAFLSGEQKKAIVD
LLFKTNRKVTVKQLKEDYFKKIECFDSVEISGVEDRFNASLGTYHDLLKI
IKDKDFLDNEENEDILEDIVLTLTLFEDREMIEERLKTYAHLFDDKVMKQ
LKRRRYTGWGRLSRKLINGIRDKQSGKTILDFLKSDGFANRNFMQLIHDD
SLTFKEDIQKAQVSGQGDSLHEHIANLAGSPAIKKGILQTVKVVDELVKV
MGRHKPENIVIEMARENQTTQKGQKNSRERMKRIEEGIKELGSQILKEHP
VENTQLQNEKLYLYYLQNGRDMYVDQELDINRLSDYDVDHIVPQSFLKDD
SIDNKVLTRSDKNRGKSDNVPSEEVVKKMKNYWRQLLNAKLITQRKFDNL
TKAERGGLSELDKAGFIKRQLVETRQITKHVAQILDSRMNTKYDENDKLI
REVKVITLKSKLVSDFRKDFQFYKVREINNYHHAHDAYLNAVVGTALIKK
YPKLESEFVYGDYKVYDVRKMIAKSEGSSGSETPGTSESATPESSGSEVE
FSHEYWMRHALTLAKRARDEREVPVGAVLVLNNRVIGEGWNRAIGLHDPT
AHAEIMALRQGGLVMQNYRLIDATLYVTFEPCVMCAGAMIHSRIGRVVFG
VRNAKTGAAGSLMDVLHYPGMNHRVEITEGILADECAALLCYFFRMPRQV
FNAQKKAQSSTDQEIGKATAKYFFYSNIMNFFKTEITLANGEIRKRPLIE
TNGETGEIVWDKGRDFATVRKVLSMPQVNIVKKTEVQTGGFSKESILPKR
NSDKLIARKKDWDPKKYGGFDSPTVAYSVLVVAKVEKGKSKKLKSVKELL
GITIMERSSFEKNPIDFLEAKGYKEVKKDLIIKLPKYSLFELENGRKRML
ASAGELQKGNELALPSKYVNFLYLASHYEKLKGSPEDNEQKQLFVEQHKH
YLDEIIEQISEFSKRVILADANLDKVLSAYNKHRDKPIREQAENIIHLET
LTNLGAPAAFKYFDTTIDRKRYTSTKEVLDATLIHQSITGLYETRIDLSQ
LGGD
109 Cas9 TadAins 768
MDKKYSIGLAIGTNSVGWAVITDEYKVPSKKFKVLGNTDRHSIKKNLIGA
LLFDSGETAEATRLKRTARRRYTRRKNRICYLQEIFSNEMAKVDDSFFHR
LEESFLVEEDKKHERHPIFGNIVDEVAYHEKYPTIYHLRKKLVDSTDKAD
LRLIYLALAHMIKFRGHFLIEGDLNPDNSDVDKLFIQLVQTYNQLFEENP
INASGVDAKAILSARLSKSRRLENLIAQLPGEKKNGLFGNLIALSLGLTP
NFKSNFDLAEDAKLQLSKDTYDDDLDNLLAQIGDQYADLFLAAKNLSDAI
LLSDILRVNTEITKAPLSASMIKRYDEHHQDLTLLKALVRQQLPEKYKEI
FFDQSKNGYAGYIDGGASQEEFYKFIKPILEKMDGTEELLVKLNREDLLR
KQRTFDNGSIPHQIHLGELHAILRRQEDFYPFLKDNREKIEKILTFRIPY
YVGPLARGNSRFAWMTRKSEETITPWNFEEVVDKGASAQSFIERMTNFDK
NLPNEKVLPKHSLLYEYFTVYNELTKVKYVTEGMRKPAFLSGEQKKAIVD
LLFKTNRKVTVKQLKEDYFKKIECFDSVEISGVEDRFNASLGTYHDLLKI
IKDKDFLDNEENEDILEDIVLTLTLFEDREMIEERLKTYAHLFDDKVMKQ
LKRRRYTGWGRLSRKLINGIRDKQSGKTILDFLKSDGFANRNFMQLIHDD
SLTFKEDIQKAQVSGQGDSLHEHIANLAGSPAIKKGILQTVKVVDELVKV
MGRHKPENIVIEMARENQGSSGSETPGTSESATPESSGSEVEFSHEYWMR
HALTLAKRARDEREVPVGAVLVLNNRVIGEGWNRAIGLHDPTAHAEIMAL
RQGGLVMQNYRLIDATLYVTFEPCVMCAGAMIHSRIGRVVFGVRNAKTGA
AGSLMDVLHYPGMNHRVEITEGILADECAALLCYFFRMPRTTQKGQKNSR
ERMKRIEEGIKELGSQILKEHPVENTQLQNEKLYLYYLQNGRDMYVDQEL
DINRLSDYDVDHIVPQSFLKDDSIDNKVLTRSDKNRGKSDNVPSEEVVKK
MKNYWRQLLNAKLITQRKFDNLTKAERGGLSELDKAGFIKRQLVETRQIT
KHVAQILDSRMNTKYDENDKLIREVKVITLKSKLVSDFRKDFQFYKVREI
NNYHHAHDAYLNAVVGTALIKKYPKLESEFVYGDYKVYDVRKMIAKSEQE
IGKATAKYFFYSNIMNFFKTEITLANGEIRKRPLIETNGETGEIVWDKGR
DFATVRKVLSMPQVNIVKKTEVQTGGFSKESILPKRNSDKLIARKKDWDP
KKYGGFDSPTVAYSVLVVAKVEKGKSKKLKSVKELLGITIMERSSFEKNP
IDFLEAKGYKEVKKDLIIKLPKYSLFELENGRKRMLASAGELQKGNELAL
PSKYVNFLYLASHYEKLKGSPEDNEQKQLFVEQHKHYLDEIIEQISEFSK
RVILADANLDKVLSAYNKHRDKPIREQAENIIHLFTLTNLGAPAAFKYFD
TTIDRKRYTSTKEVLDATLIHQSITGLYETRIDLSQLGGD
110.1 Cas9 TadAins 1250
MDKKYSIGLAIGTNSVGWAVITDEYKVPSKKFKVLGNTDRHSIKKNLIGA
LLFDSGETAEATRLKRTARRRYTRRKNRICYLQEIFSNEMAKVDDSFFHR
LEESFLVEEDKKHERHPIFGNIVDEVAYHEKYPTIYHLRKKLVDSTDKAD
LRLIYLALAHMIKFRGHFLIEGDLNPDNSDVDKLFIQLVQTYNQLFEENP
INASGVDAKAILSARLSKSRRLENLIAQLPGEKKNGLFGNLIALSLGLTP
NFKSNFDLAEDAKLQLSKDTYDDDLDNLLAQIGDQYADLFLAAKNLSDAI
LLSDILRVNTEITKAPLSASMIKRYDEHHQDLTLLKALVRQQLPEKYKEI
FFDQSKNGYAGYIDGGASQEEFYKFIKPILEKMDGTEELLVKLNREDLLR
KQRTFDNGSIPHQIHLGELHAILRRQEDFYPFLKDNREKIEKILTFRIPY
YVGPLARGNSRFAWMTRKSEETITPWNFEEVVDKGASAQSFIERMTNFDK
NLPNEKVLPKHSLLYEYFTVYNELTKVKYVTEGMRKPAFLSGEQKKAIVD
LLFKTNRKVTVKQLKEDYFKKIECFDSVEISGVEDRFNASLGTYHDLLKI
IKDKDFLDNEENEDILEDIVLTLTLFEDREMIEERLKTYAHLFDDKVMKQ
LKRRRYTGWGRLSRKLINGIRDKQSGKTILDFLKSDGFANRNFMQLIHDD
SLTFKEDIQKAQVSGQGDSLHEHIANLAGSPAIKKGILQTVKVVDELVKV
MGRHKPENIVIEMARENQTTQKGQKNSRERMKRIEEGIKELGSQILKEHP
VENTQLQNEKLYLYYLQNGRDMYVDQELDINRLSDYDVDHIVPQSFLKDD
SIDNKVLTRSDKNRGKSDNVPSEEVVKKMKNYWRQLLNAKLITQRKFDNL
TKAERGGLSELDKAGFIKRQLVETRQITKHVAQILDSRMNTKYDENDKLI
REVKVITLKSKLVSDFRKDFQFYKVREINNYHHAHDAYLNAVVGTALIKK
YPKLESEFVYGDYKVYDVRKMIAKSEQEIGKATAKYFFYSNIMNFFKTEI
TLANGEIRKRPLIETNGETGEIVWDKGRDFATVRKVLSMPQVNIVKKTEV
QTGGFSKESILPKRNSDKLIARKKDWDPKKYGGFDSPTVAYSVLVVAKVE
KGKSKKLKSVKELLGITIMERSSFEKNPIDFLEAKGYKEVKKDLIIKLPK
YSLFELENGRKRMLASAGELQKGNELALPSKYVNFLYLASHYEKLKGSPG
SSGSETPGTSESATPESSGSEVEFSHEYWMRHALTLAKRARDEREVPVGA
VLVLNNRVIGEGWNRAIGLHDPTAHAEIMALRQGGLVMQNYRLIDATLYV
TFEPCVMCAGAMIHSRIGRVVFGVRNAKTGAAGSLMDVLHYPGMNHRVEI
TEGILADECAALLCYFFRMPREDNEQKQLFVEQHKHYLDEIIEQISEFSK
RVILADANLDKVLSAYNKHRDKPIREQAENIIHLFTLTNLGAPAAFKYFD
TTIDRKRYTSTKEVLDATLIHQSITGLYETRIDLSQLGGD
110.2 Cas9 TadAins 1250
MDKKYSIGLAIGTNSVGWAVITDEYKVPSKKFKVLGNTDRHSIKKNLIGA
LLFDSGETAEATRLKRTARRRYTRRKNRICYLQEIFSNEMAKVDDSFFHR
LEESFLVEEDKKHERHPIFGNIVDEVAYHEKYPTIYHLRKKLVDSTDKAD
LRLIYLALAHMIKFRGHFLIEGDLNPDNSDVDKLFIQLVQTYNQLFEENP
INASGVDAKAILSARLSKSRRLENLIAQLPGEKKNGLFGNLIALSLGLTP
NFKSNFDLAEDAKLQLSKDTYDDDLDNLLAQIGDQYADLFLAAKNLSDAI
LLSDILRVNTEITKAPLSASMIKRYDEHHQDLTLLKALVRQQLPEKYKEI
FFDQSKNGYAGYIDGGASQEEEYKEIKPILEKMDGTEELLVKLNREDLLR
KQRTFDNGSIPHQIHLGELHAILRRQEDFYPFLKDNREKIEKILTFRIPY
YVGPLARGNSRFAWMTRKSEETITPWNFEEVVDKGASAQSFIERMTNFDK
NLPNEKVLPKHSLLYEYFTVYNELTKVKYVTEGMRKPAFLSGEQKKAIVD
LLFKTNRKVTVKQLKEDYFKKIECFDSVEISGVEDRFNASLGTYHDLLKI
IKDKDFLDNEENEDILEDIVLTLTLFEDREMIEERLKTYAHLFDDKVMKQ
LKRRRYTGWGRLSRKLINGIRDKQSGKTILDFLKSDGFANRNFMQLIHDD
SLTFKEDIQKAQVSGQGDSLHEHIANLAGSPAIKKGILQTVKVVDELVKV
MGRHKPENIVIEMARENQTTQKGQKNSRERMKRIEEGIKELGSQILKEHP
VENTQLQNEKLYLYYLQNGRDMYVDQELDINRLSDYDVDHIVPQSFLKDD
SIDNKVLTRSDKNRGKSDNVPSEEVVKKMKNYWRQLLNAKLITQRKFDNL
TKAERGGLSELDKAGFIKRQLVETRQITKHVAQILDSRMNTKYDENDKLI
REVKVITLKSKLVSDFRKDFQFYKVREINNYHHAHDAYLNAVVGTALIKK
YPKLESEFVYGDYKVYDVRKMIAKSEQEIGKATAKYFFYSNIMNFFKTEI
TLANGEIRKRPLIETNGETGEIVWDKGRDFATVRKVLSMPQVNIVKKTEV
QTGGFSKESILPKRNSDKLIARKKDWDPKKYGGFDSPTVAYSVLVVAKVE
KGKSKKLKSVKELLGITIMERSSFEKNPIDFLEAKGYKEVKKDLIIKLPK
YSLFELENGRKRMLASAGELQKGNELALPSKYVNFLYLASHYEKLKGSPG
SSGSSGSETPGTSESATPESSGSEVEFSHEYWMRHALTLAKRARDEREVP
VGAVLVLNNRVIGEGWNRAIGLHDPTAHAEIMALRQGGLVMQNYRLIDAT
LYVTFEPCVMCAGAMIHSRIGRVVFGVRNAKTGAAGSLMDVLHYPGMNHR
VEITEGILADECAALLCYFFRMPREDNEQKQLFVEQHKHYLDEIIEQISE
FSKRVILADANLDKVLSAYNKHRDKPIREQAENIIHLFTLTNLGAPAAFK
YFDTTIDRKRYTSTKEVLDATLIHQSITGLYETRIDLSQLGGD
110.3 Cas9 TadAins 1250
MDKKYSIGLAIGTNSVGWAVITDEYKVPSKKFKVLGNTDRHSIKKNLIGA
LLFDSGETAEATRLKRTARRRYTRRKNRICYLQEIFSNEMAKVDDSFFHR
LEESFLVEEDKKHERHPIFGNIVDEVAYHEKYPTIYHLRKKLVDSTDKAD
LRLIYLALAHMIKFRGHFLIEGDLNPDNSDVDKLFIQLVQTYNQLFEENP
INASGVDAKAILSARLSKSRRLENLIAQLPGEKKNGLFGNLIALSLGLTP
NFKSNFDLAEDAKLQLSKDTYDDDLDNLLAQIGDQYADLFLAAKNLSDAI
LLSDILRVNTEITKAPLSASMIKRYDEHHQDLTLLKALVRQQLPEKYKEI
FFDQSKNGYAGYIDGGASQEEFYKFIKPILEKMDGTEELLVKLNREDLLR
KQRTFDNGSIPHQIHLGELHAILRRQEDFYPFLKDNREKIEKILTFRIPY
YVGPLARGNSRFAWMTRKSEETITPWNFEEVVDKGASAQSFIERMTNEDK
NLPNEKVLPKHSLLYEYFTVYNELTKVKYVTEGMRKPAFLSGEQKKAIVD
LLFKTNRKVTVKQLKEDYFKKIECFDSVEISGVEDRFNASLGTYHDLLKI
IKDKDFLDNEENEDILEDIVLTLTLFEDREMIEERLKTYAHLFDDKVMKQ
LKRRRYTGWGRLSRKLINGIRDKQSGKTILDFLKSDGFANRNFMQLIHDD
SLTFKEDIQKAQVSGQGDSLHEHIANLAGSPAIKKGILQTVKVVDELVKV
MGRHKPENIVIEMARENQTTQKGQKNSRERMKRIEEGIKELGSQILKEHP
VENTQLQNEKLYLYYLQNGRDMYVDQELDINRLSDYDVDHIVPQSFLKDD
SIDNKVLTRSDKNRGKSDNVPSEEVVKKMKNYWRQLLNAKLITQRKFDNL
TKAERGGLSELDKAGFIKRQLVETRQITKHVAQILDSRMNTKYDENDKLI
REVKVITLKSKLVSDFRKDFQFYKVREINNYHHAHDAYLNAVVGTALIKK
YPKLESEFVYGDYKVYDVRKMIAKSEQEIGKATAKYFFYSNIMNFFKTEI
TLANGEIRKRPLIETNGETGEIVWDKGRDFATVRKVLSMPQVNIVKKTEV
QTGGFSKESILPKRNSDKLIARKKDWDPKKYGGFDSPTVAYSVLVVAKVE
KGKSKKLKSVKELLGITIMERSSFEKNPIDFLEAKGYKEVKKDLIIKLPK
YSLFELENGRKRMLASAGELQKGNELALPSKYVNFLYLASHYEKLKGSPG
SSGSSGSETPGTSESATPESGSSSGSEVEFSHEYWMRHALTLAKRARDER
EVPVGAVLVLNNRVIGEGWNRAIGLHDPTAHAEIMALRQGGLVMQNYRLI
DATLYVTFEPCVMCAGAMIHSRIGRVVFGVRNAKTGAAGSLMDVLHYPGM
NHRVEITEGILADECAALLCYFFRMPREDNEQKQLFVEQHKHYLDEIIEQ
ISEFSKRVILADANLDKVLSAYNKHRDKPIREQAENIIHLFTLTNLGAPA
AFKYFDTTIDRKRYTSTKEVLDATLIHQSITGLYETRIDLSQLGGD
110.4 Cas9 TadAins 1250
MDKKYSIGLAIGTNSVGWAVITDEYKVPSKKFKVLGNTDRHSIKKNLIGA
LLFDSGETAEATRLKRTARRRYTRRKNRICYLQEIFSNEMAKVDDSFFHR
LEESFLVEEDKKHERHPIFGNIVDEVAYHEKYPTIYHLRKKLVDSTDKAD
LRLIYLALAHMIKFRGHFLIEGDLNPDNSDVDKLFIQLVQTYNQLFEENP
INASGVDAKAILSARLSKSRRLENLIAQLPGEKKNGLFGNLIALSLGLTP
NFKSNFDLAEDAKLQLSKDTYDDDLDNLLAQIGDQYADLFLAAKNLSDAI
LLSDILRVNTEITKAPLSASMIKRYDEHHQDLTLLKALVRQQLPEKYKEI
FFDQSKNGYAGYIDGGASQEEFYKFIKPILEKMDGTEELLVKLNREDLLR
KQRTFDNGSIPHQIHLGELHAILRRQEDFYPFLKDNREKIEKILTFRIPY
YVGPLARGNSRFAWMTRKSEETITPWNFEEVVDKGASAQSFIERMTNFDK
NLPNEKVLPKHSLLYEYFTVYNELTKVKYVTEGMRKPAFLSGEQKKAIVD
LLFKTNRKVTVKQLKEDYFKKIECFDSVEISGVEDRFNASLGTYHDLLKI
IKDKDFLDNEENEDILEDIVLTLTLFEDREMIEERLKTYAHLFDDKVMKQ
LKRRRYTGWGRLSRKLINGIRDKQSGKTILDFLKSDGFANRNFMQLIHDD
SLTFKEDIQKAQVSGQGDSLHEHIANLAGSPAIKKGILQTVKVVDELVKV
MGRHKPENIVIEMARENQTTQKGQKNSRERMKRIEEGIKELGSQILKEHP
VENTQLQNEKLYLYYLQNGRDMYVDQELDINRLSDYDVDHIVPQSFLKDD
SIDNKVLTRSDKNRGKSDNVPSEEVVKKMKNYWRQLLNAKLITQRKFDNL
TKAERGGLSELDKAGFIKRQLVETRQITKHVAQILDSRMNTKYDENDKLI
REVKVITLKSKLVSDFRKDFQFYKVREINNYHHAHDAYLNAVVGTALIKK
YPKLESEFVYGDYKVYDVRKMIAKSEQEIGKATAKYFFYSNIMNFFKTEI
TLANGEIRKRPLIETNGETGEIVWDKGRDFATVRKVLSMPQVNIVKKTEV
QTGGFSKESILPKRNSDKLIARKKDWDPKKYGGFDSPTVAYSVLVVAKVE
KGKSKKLKSVKELLGITIMERSSFEKNPIDFLEAKGYKEVKKDLIIKLPK
YSLFELENGRKRMLASAGELQKGNELALPSKYVNFLYLASHYEKLKGSPG
SSGSSGSETPGTSESATPESGSSSGSEVEFSHEYWMRHALTLAKRARDER
EVPVGAVLVLNNRVIGEGWNRAIGLHDPTAHAEIMALRQGGLVMQNYRLI
DATLYVTFEPCVMCAGAMIHSRIGRVVFGVRNAKTGAAGSLMDVLHYPGM
NHRVEITEGILADECAALLCYFFRMRREDNEQKQLFVEQHKHYLDEIIEQ
ISEFSKRVILADANLDKVLSAYNKHRDKPIREQAENIIHLFTLTNLGAPA
AFKYFDTTIDRKRYTSTKEVLDATLIHQSITGLYETRIDLSQLGGD
110.5 Cas9 TadAins 1249
MDKKYSIGLAIGTNSVGWAVITDEYKVPSKKFKVLGNTDRHSIKKNLIGA
LLFDSGETAEATRLKRTARRRYTRRKNRICYLQEIFSNEMAKVDDSFFHR
LEESFLVEEDKKHERHPIFGNIVDEVAYHEKYPTIYHLRKKLVDSTDKAD
LRLIYLALAHMIKFRGHFLIEGDLNPDNSDVDKLFIQLVQTYNQLFEENP
INASGVDAKAILSARLSKSRRLENLIAQLPGEKKNGLFGNLIALSLGLTP
NFKSNFDLAEDAKLQLSKDTYDDDLDNLLAQIGDQYADLFLAAKNLSDAI
LLSDILRVNTEITKAPLSASMIKRYDEHHQDLTLLKALVRQQLPEKYKEI
FFDQSKNGYAGYIDGGASQEEFYKFIKPILEKMDGTEELLVKLNREDLLR
KQRTFDNGSIPHQIHLGELHAILRRQEDFYPFLKDNREKIEKILTFRIPY
YVGPLARGNSRFAWMTRKSEETITPWNFEEVVDKGASAQSFIERMTNFDK
NLPNEKVLPKHSLLYEYFTVYNELTKVKYVTEGMRKPAFLSGEQKKAIVD
LLFKTNRKVTVKQLKEDYFKKIECFDSVEISGVEDRFNASLGTYHDLLKI
IKDKDFLDNEENEDILEDIVLTLTLFEDREMIEERLKTYAHLFDDKVMKQ
LKRRRYTGWGRLSRKLINGIRDKQSGKTILDELKSDGFANRNEMQLIHDD
SLTFKEDIQKAQVSGQGDSLHEHIANLAGSPAIKKGILQTVKVVDELVKV
MGRHKPENIVIEMARENQTTQKGQKNSRERMKRIEEGIKELGSQILKEHP
VENTQLQNEKLYLYYLQNGRDMYVDQELDINRLSDYDVDHIVPQSFLKDD
SIDNKVLTRSDKNRGKSDNVPSEEVVKKMKNYWRQLLNAKLITQRKFDNL
TKAERGGLSELDKAGFIKRQLVETRQITKHVAQILDSRMNTKYDENDKLI
REVKVITLKSKLVSDFRKDFQFYKVREINNYHHAHDAYLNAVVGTALIKK
YPKLESEFVYGDYKVYDVRKMIAKSEQEIGKATAKYFFYSNIMNFFKTEI
TLANGEIRKRPLIETNGETGEIVWDKGRDFATVRKVLSMPQVNIVKKTEV
QTGGFSKESILPKRNSDKLIARKKDWDPKKYGGFDSPTVAYSVLVVAKVE
KGKSKKLKSVKELLGITIMERSSFEKNPIDFLEAKGYKEVKKDLIIKLPK
YSLFELENGRKRMLASAGELQKGNELALPSKYVNFLYLASHYEKLKGSGS
SGSSGSETPGTSESATPESGSSSGSEVEFSHEYWMRHALTLAKRARDERE
VPVGAVLVLNNRVIGEGWNRAIGLHDPTAHAEIMALRQGGLVMQNYRLID
ATLYVTFEPCVMCAGAMIHSRIGRVVFGVRNAKTGAAGSLMDVLHYPGMN
HRVEITEGILADECAALLCYFFRMRRPEDNEQKQLFVEQHKHYLDEIIEQ
ISEFSKRVILADANLDKVLSAYNKHRDKPIREQAENIIHLFTLTNLGAPA
AFKYFDTTIDRKRYTSTKEVLDATLIHQSITGLYETRIDLSQLGGD
110.5 Cas9 TadAins delta 59-66 1250
MDKKYSIGLAIGTNSVGWAVITDEYKVPSKKFKVLGNTDRHSIKKNLIGA
LLFDSGETAEATRLKRTARRRYTRRKNRICYLQEIFSNEMAKVDDSFFHR
LEESFLVEEDKKHERHPIFGNIVDEVAYHEKYPTIYHLRKKLVDSTDKAD
LRLIYLALAHMIKFRGHFLIEGDLNPDNSDVDKLFIQLVQTYNQLFEENP
INASGVDAKAILSARLSKSRRLENLIAQLPGEKKNGLFGNLIALSLGLTP
NFKSNFDLAEDAKLQLSKDTYDDDLDNLLAQIGDQYADLFLAAKNLSDAI
LLSDILRVNTEITKAPLSASMIKRYDEHHQDLTLLKALVRQQLPEKYKEI
FFDQSKNGYAGYIDGGASQEEFYKFIKPILEKMDGTEELLVKLNREDLLR
KQRTFDNGSIPHQIHLGELHAILRRQEDFYPFLKDNREKIEKILTFRIPY
YVGPLARGNSRFAWMTRKSEETITPWNFEEVVDKGASAQSFIERMTNFDK
NLPNEKVLPKHSLLYEYFTVYNELTKVKYVTEGMRKPAFLSGEQKKAIVD
LLFKTNRKVTVKQLKEDYFKKIECFDSVEISGVEDRFNASLGTYHDLLKI
IKDKDFLDNEENEDILEDIVLTLTLFEDREMIEERLKTYAHLFDDKVMKQ
LKRRRYTGWGRLSRKLINGIRDKQSGKTILDFLKSDGFANRNFMQLIHDD
SLTFKEDIQKAQVSGQGDSLHEHIANLAGSPAIKKGILQTVKVVDELVKV
MGRHKPENIVIEMARENQTTQKGQKNSRERMKRIEEGIKELGSQILKEHP
VENTQLQNEKLYLYYLQNGRDMYVDQELDINRLSDYDVDHIVPQSFLKDD
SIDNKVLTRSDKNRGKSDNVPSEEVVKKMKNYWRQLLNAKLITQRKFDNL
TKAERGGLSELDKAGFIKRQLVETRQITKHVAQILDSRMNTKYDENDKLI
REVKVITLKSKLVSDFRKDFQFYKVREINNYHHAHDAYLNAVVGTALIKK
YPKLESEFVYGDYKVYDVRKMIAKSEQEIGKATAKYFFYSNIMNFFKTEI
TLANGEIRKRPLIETNGETGEIVWDKGRDFATVRKVLSMPQVNIVKKTEV
QTGGFSKESILPKRNSDKLIARKKDWDPKKYGGFDSPTVAYSVLVVAKVE
KGKSKKLKSVKELLGITIMERSSFEKNPIDFLEAKGYKEVKKDLIIKLPK
YSLFELENGRKRMLASAGELQKGNELALPSKYVNFLYLASHYEKLKGSPG
SSGSSGSETPGTSESATPESGSSGSEVEFSHEYWMRHALTLAKRARDERE
VPVGAVLVLNNRVIGEGWNRAHAEIMALRQGGLVMQNYRLIDATLYVTFE
PCVMCAGAMIHSRIGRVVFGVRNAKTGAAGSLMDVLHYPGMNHRVEITEG
ILADECAALLCYFFRMPRQVFNAQKKAQSSTDEDNEQKQLFVEQHKHYLD
EIIEQISEFSKRVILADANLDKVLSAYNKHRDKPIREQAENIIHLETLTN
LGAPAAFKYFDTTIDRKRYTSTKEVLDATLIHQSITGLYETRIDLSQLGG
D
110.6 Cas9 TadAins 1251
MDKKYSIGLAIGTNSVGWAVITDEYKVPSKKFKVLGNTDRHSIKKNLIGA
LLFDSGETAEATRLKRTARRRYTRRKNRICYLQEIFSNEMAKVDDSFFHR
LEESFLVEEDKKHERHPIFGNIVDEVAYHEKYPTIYHLRKKLVDSTDKAD
LRLIYLALAHMIKFRGHFLIEGDLNPDNSDVDKLFIQLVQTYNQLFEENP
INASGVDAKAILSARLSKSRRLENLIAQLPGEKKNGLFGNLIALSLGLTP
NFKSNFDLAEDAKLQLSKDTYDDDLDNLLAQIGDQYADLFLAAKNLSDAI
LLSDILRVNTEITKAPLSASMIKRYDEHHQDLTLLKALVRQQLPEKYKEI
FFDQSKNGYAGYIDGGASQEEFYKFIKPILEKMDGTEELLVKLNREDLLR
KQRTFDNGSIPHQIHLGELHAILRRQEDFYPFLKDNREKIEKILTFRIPY
YVGPLARGNSRFAWMTRKSEETITPWNFEEVVDKGASAQSFIERMTNFDK
NLPNEKVLPKHSLLYEYFTVYNELTKVKYVTEGMRKPAFLSGEQKKAIVD
LLFKTNRKVTVKQLKEDYFKKIECFDSVEISGVEDRFNASLGTYHDLLKI
IKDKDFLDNEENEDILEDIVLTLTLFEDREMIEERLKTYAHLFDDKVMKQ
LKRRRYTGWGRLSRKLINGIRDKQSGKTILDFLKSDGFANRNFMQLIHDD
SLTFKEDIQKAQVSGQGDSLHEHIANLAGSPAIKKGILQTVKVVDELVKV
MGRHKPENIVIEMARENQTTQKGQKNSRERMKRIEEGIKELGSQILKEHP
VENTQLQNEKLYLYYLQNGRDMYVDQELDINRLSDYDVDHIVPQSFLKDD
SIDNKVLTRSDKNRGKSDNVPSEEVVKKMKNYWRQLLNAKLITQRKFDNL
TKAERGGLSELDKAGFIKRQLVETRQITKHVAQILDSRMNTKYDENDKLI
REVKVITLKSKLVSDFRKDFQFYKVREINNYHHAHDAYLNAVVGTALIKK
YPKLESEFVYGDYKVYDVRKMIAKSEQEIGKATAKYFFYSNIMNFFKTEI
TLANGEIRKRPLIETNGETGEIVWDKGRDFATVRKVLSMPQVNIVKKTEV
QTGGFSKESILPKRNSDKLIARKKDWDPKKYGGFDSPTVAYSVLVVAKVE
KGKSKKLKSVKELLGITIMERSSFEKNPIDFLEAKGYKEVKKDLIIKLPK
YSLFELENGRKRMLASAGELQKGNELALPSKYVNFLYLASHYEKLKGSPE
GSSGSSGSETPGTSESATPESGSSSGSEVEFSHEYWMRHALTLAKRARDE
REVPVGAVLVLNNRVIGEGWNRAIGLHDPTAHAEIMALRQGGLVMQNYRL
IDATLYVTFEPCVMCAGAMIHSRIGRVVFGVRNAKTGAAGSLMDVLHYPG
MNHRVEITEGILADECAALLCYFFRMRRDNEQKQLFVEQHKHYLDEIIEQ
ISEFSKRVILADANLDKVLSAYNKHRDKPIREQAENIIHLFTLTNLGAPA
AFKYFDTTIDRKRYTSTKEVLDATLIHQSITGLYETRIDLSQLGGD
110.7 Cas9 TadAins 1252
MDKKYSIGLAIGTNSVGWAVITDEYKVPSKKFKVLGNTDRHSIKKNLIGA
LLFDSGETAEATRLKRTARRRYTRRKNRICYLQEIFSNEMAKVDDSFFHR
LEESFLVEEDKKHERHPIFGNIVDEVAYHEKYPTIYHLRKKLVDSTDKAD
LRLIYLALAHMIKFRGHFLIEGDLNPDNSDVDKLFIQLVQTYNQLFEENP
INASGVDAKAILSARLSKSRRLENLIAQLPGEKKNGLFGNLIALSLGLTP
NFKSNFDLAEDAKLQLSKDTYDDDLDNLLAQIGDQYADLFLAAKNLSDAI
LLSDILRVNTEITKAPLSASMIKRYDEHHQDLTLLKALVRQQLPEKYKEI
FFDQSKNGYAGYIDGGASQEEFYKFIKPILEKMDGTEELLVKLNREDLLR
KQRTFDNGSIPHQIHLGELHAILRRQEDFYPFLKDNREKIEKILTFRIPY
YVGPLARGNSRFAWMTRKSEETITPWNFEEVVDKGASAQSFIERMTNFDK
NLPNEKVLPKHSLLYEYFTVYNELTKVKYVTEGMRKPAFLSGEQKKAIVD
LLFKTNRKVTVKQLKEDYFKKIECFDSVEISGVEDRFNASLGTYHDLLKI
IKDKDFLDNEENEDILEDIVLTLTLFEDREMIEERLKTYAHLFDDKVMKQ
LKRRRYTGWGRLSRKLINGIRDKQSGKTILDFLKSDGFANRNFMQLIHDD
SLTFKEDIQKAQVSGQGDSLHEHIANLAGSPAIKKGILQTVKVVDELVKV
MGRHKPENIVIEMARENQTTQKGQKNSRERMKRIEEGIKELGSQILKEHP
VENTQLQNEKLYLYYLQNGRDMYVDQELDINRLSDYDVDHIVPQSFLKDD
SIDNKVLTRSDKNRGKSDNVPSEEVVKKMKNYWRQLLNAKLITQRKFDNL
TKAERGGLSELDKAGFIKRQLVETRQITKHVAQILDSRMNTKYDENDKLI
REVKVITLKSKLVSDFRKDFQFYKVREINNYHHAHDAYLNAVVGTALIKK
YPKLESEFVYGDYKVYDVRKMIAKSEQEIGKATAKYFFYSNIMNFFKTEI
TLANGEIRKRPLIETNGETGEIVWDKGRDFATVRKVLSMPQVNIVKKTEV
QTGGFSKESILPKRNSDKLIARKKDWDPKKYGGFDSPTVAYSVLVVAKVE
KGKSKKLKSVKELLGITIMERSSFEKNPIDFLEAKGYKEVKKDLIIKLPK
YSLFELENGRKRMLASAGELQKGNELALPSKYVNFLYLASHYEKLKGSPE
DGSSGSSGSETPGTSESATPESGSSSGSEVEFSHEYWMRHALTLAKRARD
EREVPVGAVLVLNNRVIGEGWNRAIGLHDPTAHAEIMALRQGGLVMQNYR
LIDATLYVTFEPCVMCAGAMIHSRIGRVVFGVRNAKTGAAGSLMDVLHYP
GMNHRVEITEGILADEGAALLCYFFRMRRNEQKQLFVEQHKHYLDEIIEQ
ISEFSKRVILADANLDKVLSAYNKHRDKPIREQAENIIHLFTLTNLGAPA
AFKYFDTTIDRKRYTSTKEVLDATLIHQSITGLYETRIDLSQLGGD
110.8 Cas9 TadAins delta 59-66 C-truncate 1250
MDKKYSIGLAIGTNSVGWAVITDEYKVPSKKFKVLGNTDRHSIKKNLIGA
LLFDSGETAEATRLKRTARRRYTRRKNRICYLQEIFSNEMAKVDDSFFHR
LEESFLVEEDKKHERHPIFGNIVDEVAYHEKYPTIYHLRKKLVDSTDKAD
LRLIYLALAHMIKFRGHFLIEGDLNPDNSDVDKLFIQLVQTYNQLFEENP
INASGVDAKAILSARLSKSRRLENLIAQLPGEKKNGLFGNLIALSLGLTP
NFKSNFDLAEDAKLQLSKDTYDDDLDNLLAQIGDQYADLFLAAKNLSDAI
LLSDILRVNTEITKAPLSASMIKRYDEHHQDLTLLKALVRQQLPEKYKEI
FFDQSKNGYAGYIDGGASQEEFYKFIKPILEKMDGTEELLVKLNREDLLR
KQRTFDNGSIPHQIHLGELHAILRRQEDFYPFLKDNREKIEKILTFRIPY
YVGPLARGNSRFAWMTRKSEETITPWNFEEVVDKGASAQSFIERMTNFDK
NLPNEKVLPKHSLLYEYFTVYNELTKVKYVTEGMRKPAFLSGEQKKAIVD
LLFKTNRKVTVKQLKEDYFKKIECFDSVEISGVEDRFNASLGTYHDLLKI
IKDKDFLDNEENEDILEDIVLTLTLFEDREMIEERLKTYAHLFDDKVMKQ
LKRRRYTGWGRLSRKLINGIRDKQSGKTILDFLKSDGFANRNFMQLIHDD
SLTFKEDIQKAQVSGQGDSLHEHIANLAGSPAIKKGILQTVKVVDELVKV
MGRHKPENIVIEMARENQTTQKGQKNSRERMKRIEEGIKELGSQILKEHP
VENTQLQNEKLYLYYLQNGRDMYVDQELDINRLSDYDVDHIVPQSFLKDD
SIDNKVLTRSDKNRGKSDNVPSEEVVKKMKNYWRQLLNAKLITQRKFDNL
TKAERGGLSELDKAGFIKRQLVETRQITKHVAQILDSRMNTKYDENDKLI
REVKVITLKSKLVSDFRKDFQFYKVREINNYHHAHDAYLNAVVGTALIKK
YPKLESEEVYGDYKVYDVRKMIAKSEQEIGKATAKYFFYSNIMNFFKTEI
TLANGEIRKRPLIETNGETGEIVWDKGRDFATVRKVLSMPQVNIVKKTEV
QTGGFSKESILPKRNSDKLIARKKDWDPKKYGGFDSPTVAYSVLVVAKVE
KGKSKKLKSVKELLGITIMERSSFEKNPIDFLEAKGYKEVKKDLIIKLPK
YSLFELENGRKRMLASAGELQKGNELALPSKYVNFLYLASHYEKLKGSPG
SSGSETPGTSESATPESSGSEVEFSHEYWMRHALTLAKRARDEREVPVGA
VLVLNNRVIGEGWNRAHAEIMALRQGGLVMQNYRLIDATLYVTEEPCVMC
AGAMIHSRIGRVVFGVRNAKTGAAGSLMDVLHYPGMNHRVEITEGILADE
CAALLCYFFRMPRQEDNEQKQLFVEQHKHYLDEIIEQISEFSKRVILADA
NLDKVLSAYNKHRDKPIREQAENIIHLFTLTNLGAPAAFKYFDTTIDRKR
YTSTKEVLDATLIHQSITGLYETRIDLSQLGGD
111.1 Cas9 TadAins 997
MDKKYSIGLAIGTNSVGWAVITDEYKVPSKKFKVLGNTDRHSIKKNLIGA
LLFDSGETAEATRLKRTARRRYTRRKNRICYLQEIFSNEMAKVDDSFFHR
LEESFLVEEDKKHERHPIFGNIVDEVAYHEKYPTIYHLRKKLVDSTDKAD
LRLIYLALAHMIKFRGHFLIEGDLNPDNSDVDKLFIQLVQTYNQLFEENP
INASGVDAKAILSARLSKSRRLENLIAQLPGEKKNGLFGNLIALSLGLTP
NFKSNFDLAEDAKLQLSKDTYDDDLDNLLAQIGDQYADLFLAAKNLSDAI
LLSDILRVNTEITKAPLSASMIKRYDEHHQDLTLLKALVRQQLPEKYKEI
FFDQSKNGYAGYIDGGASQEEFYKFIKPILEKMDGTEELLVKLNREDLLR
KQRTFDNGSIPHQIHLGELHAILRRQEDFYPFLKDNREKIEKILTFRIPY
YVGPLARGNSRFAWMTRKSEETITPWNFEEVVDKGASAQSFIERMTNFDK
NLPNEKVLPKHSLLYEYFTVYNELTKVKYVTEGMRKPAFLSGEQKKAIVD
LLFKTNRKVTVKQLKEDYFKKIECFDSVEISGVEDRFNASLGTYHDLLKI
IKDKDFLDNEENEDILEDIVLTLTLFEDREMIEERLKTYAHLFDDKVMKQ
LKRRRYTGWGRLSRKLINGIRDKQSGKTILDFLKSDGFANRNFMQLIHDD
SLTFKEDIQKAQVSGQGDSLHEHIANLAGSPAIKKGILQTVKVVDELVKV
MGRHKPENIVIEMARENQTTQKGQKNSRERMKRIEEGIKELGSQILKEHP
VENTQLQNEKLYLYYLQNGRDMYVDQELDINRLSDYDVDHIVPQSFLKDD
SIDNKVLTRSDKNRGKSDNVPSEEVVKKMKNYWRQLLNAKLITQRKFDNL
TKAERGGLSELDKAGFIKRQLVETRQITKHVAQILDSRMNTKYDENDKLI
REVKVITLKSKLVSDFRKDFQFYKVREINNYHHAHDAYLNAVVGTALSHE
YWMRHALTLAKRARDEREVPVGAVLVLNNRVIGEGWNRAIGLHDPTAHAE
IMALRQGGLVMQNYRLIDATLYVTFEPCVMCAGAMIHSRIGRVVFGVRNA
KTGAAGSLMDVLHYPGMNHRVEITEGILADECAALLCYEFRMPRQVFNAQ
KKAQSSTDGSSGSETPGTSESATPESSGIKKYPKLESEFVYGDYKVYDVR
KMIAKSEQEIGKATAKYFFYSNIMNFFKTEITLANGEIRKRPLIETNGET
GEIVWDKGRDFATVRKVLSMPQVNIVKKTEVQTGGFSKESILPKRNSDKL
IARKKDWDPKKYGGFDSPTVAYSVLVVAKVEKGKSKKLKSVKELLGITIM
ERSSFEKNPIDFLEAKGYKEVKKDLIIKLPKYSLFELENGRKRMLASAGE
LQKGNELALPSKYVNFLYLASHYEKLKGSPEDNEQKQLFVEQHKHYLDEI
IEQISEFSKRVILADANLDKVLSAYNKHRDKPIREQAENIIHLFTLTNLG
APAAFKYFDTTIDRKRYTSTKEVLDATLIHQSITGLYETRIDLSQLGGD
111.2 Cas9 TadAins 997
MDKKYSIGLAIGTNSVGWAVITDEYKVPSKKFKVLGNTDRHSIKKNLIGA
LLEDSGETAEATRLKRTARRRYTRRKNRICYLQEIESNEMAKVDDSEEHR
LEESFLVEEDKKHERHPIFGNIVDEVAYHEKYPTIYHLRKKLVDSTDKAD
LRLIYLALAHMIKFRGHFLIEGDLNPDNSDVDKLFIQLVQTYNQLFEENP
INASGVDAKAILSARLSKSRRLENLIAQLPGEKKNGLFGNLIALSLGLTP
NFKSNFDLAEDAKLQLSKDTYDDDLDNLLAQIGDQYADLFLAAKNLSDAI
LLSDILRVNTEITKAPLSASMIKRYDEHHQDLTLLKALVRQQLPEKYKEI
FFDQSKNGYAGYIDGGASQEEFYKFIKPILEKMDGTEELLVKLNREDLLR
KQRTFDNGSIPHQIHLGELHAILRRQEDFYPFLKDNREKIEKILTFRIPY
YVGPLARGNSRFAWMTRKSEETITPWNFEEVVDKGASAQSFIERMTNFDK
NLPNEKVLPKHSLLYEYFTVYNELTKVKYVTEGMRKPAFLSGEQKKAIVD
LLFKTNRKVTVKQLKEDYFKKIECFDSVEISGVEDRFNASLGTYHDLLKI
IKDKDFLDNEENEDILEDIVLTLTLFEDREMIEERLKTYAHLFDDKVMKQ
LKRRRYTGWGRLSRKLINGIRDKQSGKTILDFLKSDGFANRNFMQLIHDD
SLTFKEDIQKAQVSGQGDSLHEHIANLAGSPAIKKGILQTVKVVDELVKV
MGRHKPENIVIEMARENQTTQKGQKNSRERMKRIEEGIKELGSQILKEHP
VENTQLQNEKLYLYYLQNGRDMYVDQELDINRLSDYDVDHIVPQSFLKDD
SIDNKVLTRSDKNRGKSDNVPSEEVVKKMKNYWRQLLNAKLITQRKFDNL
TKAERGGLSELDKAGFIKRQLVETRQITKHVAQILDSRMNTKYDENDKLI
REVKVITLKSKLVSDFRKDFQFYKVREINNYHHAHDAYLNAVVGTALSHE
YWMRHALTLAKRARDEREVPVGAVLVLNNRVIGEGWNRAIGLHDPTAHAE
IMALRQGGLVMQNYRLIDATLYVTFEPCVMCAGAMIHSRIGRVVFGVRNA
KTGAAGSLMDVLHYPGMNHRVEITEGILADECAALLCYFFRMPRQVFNAQ
KKAQSSTDGSSGSSGSETPGTSESATPESSGGSSIKKYPKLESEFVYGDY
KVYDVRKMIAKSEQEIGKATAKYFEYSNIMNEFKTEITLANGEIRKRPLI
ETNGETGEIVWDKGRDFATVRKVLSMPQVNIVKKTEVQTGGFSKESILPK
RNSDKLIARKKDWDPKKYGGFDSPTVAYSVLVVAKVEKGKSKKLKSVKEL
LGITIMERSSFEKNPIDFLEAKGYKEVKKDLIIKLPKYSLFELENGRKRM
LASAGELQKGNELALPSKYVNELYLASHYEKLKGSPEDNEQKQLEVEQHK
HYLDEIIEQISEFSKRVILADANLDKVLSAYNKHRDKPIREQAENIIHLF
TLTNLGAPAAFKYFDTTIDRKRYTSTKEVLDATLIHQSITGLYETRIDLS
QLGGD
112 delta HNH TadA
MDKKYSIGLAIGTNSVGWAVITDEYKVPSKKFKVLGNTDRHSIKKNLIGA
LLFDSGETAEATRLKRTARRRYTRRKNRICYLQEIFSNEMAKVDDSFFHR
LEESFLVEEDKKHERHPIFGNIVDEVAYHEKYPTIYHLRKKLVDSTDKAD
LRLIYLALAHMIKFRGHFLIEGDLNPDNSDVDKLFIQLVQTYNQLFEENP
INASGVDAKAILSARLSKSRRLENLIAQLPGEKKNGLFGNLIALSLGLTP
NFKSNFDLAEDAKLQLSKDTYDDDLDNLLAQIGDQYADLFLAAKNLSDAI
LLSDILRVNTEITKAPLSASMIKRYDEHHQDLTLLKALVRQQLPEKYKEI
FFDQSKNGYAGYIDGGASQEEFYKFIKPILEKMDGTEELLVKLNREDLLR
KQRTFDNGSIPHQIHLGELHAILRRQEDFYPFLKDNREKIEKILTFRIPY
YVGPLARGNSRFAWMTRKSEETITPWNFEEVVDKGASAQSFIERMTNFDK
NLPNEKVLPKHSLLYEYFTVYNELTKVKYVTEGMRKPAFLSGEQKKAIVD
LLFKTNRKVTVKQLKEDYFKKIECFDSVEISGVEDRFNASLGTYHDLLKI
IKDKDFLDNEENEDILEDIVLTLTLFEDREMIEERLKTYAHLFDDKVMKQ
LKRRRYTGWGRLSRKLINGIRDKQSGKTILDFLKSDGFANRNFMQLIHDD
SLTFKEDIQKAQVSGQGDSLHEHIANLAGSPAIKKGILQTVKVVDELVKV
MGRHKPENIVIEMARENQTTQKGQKNSRERMKRIEEGIKELGSEVEFSHE
YWMRHALTLAKRARDEREVPVGAVLVLNNRVIGEGWNRAIGLHDPTAHAE
IMALRQGGLVMQNYRLIDATLYVTFEPCVMCAGAMIHSRIGRVVFGVRNA
KTGAAGSLMDVLHYPGMNHRVEITEGILADECAALLCYFFRMPRQVFNAQ
KKAQSSTDGGLSELDKAGFIKRQLVETRQITKHVAQILDSRMNTKYDEND
KLIREVKVITLKSKLVSDFRKDFQFYKVREINNYHHAHDAYLNAVVGTAL
IKKYPKLESEFVYGDYKVYDVRKMIAKSEQEIGKATAKYFFYSNIMNFFK
TEITLANGEIRKRPLIETNGETGEIVWDKGRDFATVRKVLSMPQVNIVKK
TEVQTGGFSKESILPKRNSDKLIARKKDWDPKKYGGFDSPTVAYSVLVVA
KVEKGKSKKLKSVKELLGITIMERSSFEKNPIDFLEAKGYKEVKKDLIIK
LPKYSLFELENGRKRMLASAGELQKGNELALPSKYVNFLYLASHYEKLKG
SPEDNEQKQLEVEQHKHYLDEIIEQISEFSKRVILADANLDKVLSAYNKH
RDKPIREQAENIIHLFTLTNLGAPAAFKYFDTTIDRKRYTSTKEVLDATL
IHQSITGLYETRIDLSQLGGD
113 N-term single TadA helix trunc 165-end
MSEVEFSHEYWMRHALTLAKRARDEREVPVGAVLVLNNRVIGEGWNRAIG
LHDPTAHAEIMALRQGGLVMQNYRLIDATLYVTFEPCVMCAGAMIHSRIG
RVVFGVRNAKTGAAGSLMDVLHYPGMNHRVEITEGILADEGAALLCYFFR
MPRSGGSSGGSSGSETPGTSESATPESSGGSSGGSDKKYSIGLAIGTNSV
GWAVITDEYKVPSKKFKVLGNTDRHSIKKNLIGALLFDSGETAEATRLKR
TARRRYTRRKNRICYLQEIFSNEMAKVDDSFFHRLEESFLVEEDKKHERH
PIFGNIVDEVAYHEKYPTIYHLRKKLVDSTDKADLRLIYLALAHMIKFRG
HFLIEGDLNPDNSDVDKLFIQLVQTYNQLFEENPINASGVDAKAILSARL
SKSRRLENLIAQLPGEKKNGLFGNLIALSLGLTPNFKSNFDLAEDAKLQL
SKDTYDDDLDNLLAQIGDQYADLFLAAKNLSDAILLSDILRVNTEITKAP
LSASMIKRYDEHHQDLTLLKALVRQQLPEKYKEIFFDQSKNGYAGYIDGG
ASQEEFYKFIKPILEKMDGTEELLVKLNREDLLRKQRTFDNGSIPHQIHL
GELHAILRRQEDFYPFLKDNREKIEKILTFRIPYYVGPLARGNSRFAWMT
RKSEETITPWNFEEVVDKGASAQSFIERMTNFDKNLPNEKVLPKHSLLYE
YFTVYNELTKVKYVTEGMRKPAFLSGEQKKAIVDLLFKTNRKVTVKQLKE
DYFKKIECFDSVEISGVEDRFNASLGTYHDLLKIIKDKDFLDNEENEDIL
EDIVLTLTLFEDREMIEERLKTYAHLFDDKVMKQLKRRRYTGWGRLSRKL
INGIRDKQSGKTILDFLKSDGFANRNFMQLIHDDSLTFKEDIQKAQVSGQ
GDSLHEHIANLAGSPAIKKGILQTVKVVDELVKVMGRHKPENIVIEMARE
NQTTQKGQKNSRERMKRIEEGIKELGSQILKEHPVENTQLQNEKLYLYYL
QNGRDMYVDQELDINRLSDYDVDHIVPQSFLKDDSIDNKVLTRSDKNRGK
SDNVPSEEVVKKMKNYWRQLLNAKLITQRKFDNLTKAERGGLSELDKAGF
IKRQLVETRQITKHVAQILDSRMNTKYDENDKLIREVKVITLKSKLVSDF
RKDFQFYKVREINNYHHAHDAYLNAVVGTALIKKYPKLESEFVYGDYKVY
DVRKMIAKSEQEIGKATAKYFFYSNIMNFFKTEITLANGEIRKRPLIETN
GETGEIVWDKGRDFATVRKVLSMPQVNIVKKTEVQTGGFSKESILPKRNS
DKLIARKKDWDPKKYGGFDSPTVAYSVLVVAKVEKGKSKKLKSVKELLGI
TIMERSSFEKNPIDFLEAKGYKEVKKDLIIKLPKYSLFELENGRKRMLAS
AGELQKGNELALPSKYVNFLYLASHYEKLKGSPEDNEQKQLFVEQHKHYL
DEIIEQISEFSKRVILADANLDKVLSAYNKHRDKPIREQAENIIHLETLT
NLGAPAAFKYFDTTIDRKRYTSTKEVLDATLIHQSITGLYETRIDLSQLG
GD
114 N-term single TadA helix trunc 165-end
delta 59-65
MSEVEESHEYWMRHALTLAKRARDEREVPVGAVLVLNNRVIGEGWNRTAH
AEIMALRQGGLVMQNYRLIDATLYVTFEPCVMCAGAMIHSRIGRVVFGVR
NAKTGAAGSLMDVLHYPGMNHRVEITEGILADECAALLCYFFRMPRSGGS
SGGSSGSETPGTSESATPESSGGSSGGSDKKYSIGLAIGTNSVGWAVITD
EYKVPSKKFKVLGNTDRHSIKKNLIGALLEDSGETAEATRLKRTARRRYT
RRKNRICYLQEIFSNEMAKVDDSFFHRLEESFLVEEDKKHERHPIFGNIV
DEVAYHEKYPTIYHLRKKLVDSTDKADLRLIYLALAHMIKFRGHFLIEGD
LNPDNSDVDKLFIQLVQTYNQLFEENPINASGVDAKAILSARLSKSRRLE
NLIAQLPGEKKNGLFGNLIALSLGLTPNFKSNFDLAEDAKLQLSKDTYDD
DLDNLLAQIGDQYADLFLAAKNLSDAILLSDILRVNTEITKAPLSASMIK
RYDEHHQDLTLLKALVRQQLPEKYKEIFFDQSKNGYAGYIDGGASQEEFY
KFIKPILEKMDGTEELLVKLNREDLLRKQRTFDNGSIPHQIHLGELHAIL
RRQEDFYPFLKDNREKIEKILTFRIPYYVGPLARGNSRFAWMTRKSEETI
TPWNFEEVVDKGASAQSFIERMTNFDKNLPNEKVLPKHSLLYEYFTVYNE
LTKVKYVTEGMRKPAFLSGEQKKAIVDLLFKTNRKVTVKQLKEDYFKKIE
CFDSVEISGVEDRFNASLGTYHDLLKIIKDKDFLDNEENEDILEDIVLTL
TLFEDREMIEERLKTYAHLFDDKVMKQLKRRRYTGWGRLSRKLINGIRDK
QSGKTILDFLKSDGFANRNFMQLIHDDSLTFKEDIQKAQVSGQGDSLHEH
IANLAGSPAIKKGILQTVKVVDELVKVMGRHKPENIVIEMARENQTTQKG
QKNSRERMKRIEEGIKELGSQILKEHPVENTQLQNEKLYLYYLQNGRDMY
VDQELDINRLSDYDVDHIVPQSFLKDDSIDNKVLTRSDKNRGKSDNVPSE
EVVKKMKNYWRQLLNAKLITQRKFDNLTKAERGGLSELDKAGFIKRQLVE
TRQITKHVAQILDSRMNTKYDENDKLIREVKVITLKSKLVSDFRKDFQFY
KVREINNYHHAHDAYLNAVVGTALIKKYPKLESEFVYGDYKVYDVRKMIA
KSEQEIGKATAKYFFYSNIMNFFKTEITLANGEIRKRPLIETNGETGEIV
WDKGRDFATVRKVLSMPQVNIVKKTEVQTGGFSKESILPKRNSDKLIARK
KDWDPKKYGGFDSPTVAYSVLVVAKVEKGKSKKLKSVKELLGITIMERSS
FEKNPIDFLEAKGYKEVKKDLIIKLPKYSLFELENGRKRMLASAGELQKG
NELALPSKYVNFLYLASHYEKLKGSPEDNEQKQLFVEQHKHYLDEIIEQI
SEFSKRVILADANLDKVLSAYNKHRDKPIREQAENIIHLFTLTNLGAPAA
FKYFDTTIDRKRYTSTKEVLDATLIHQSITGLYETRIDLSQLGGD
115.1 Cas9 TadAins 1004
MDKKYSIGLAIGTNSVGWAVITDEYKVPSKKFKVLGNTDRHSIKKNLIGA
LLEDSGETAEATRLKRTARRRYTRRKNRICYLQEIFSNEMAKVDDSFFHR
LEESFLVEEDKKHERHPIFGNIVDEVAYHEKYPTIYHLRKKLVDSTDKAD
LRLIYLALAHMIKFRGHFLIEGDLNPDNSDVDKLFIQLVQTYNQLFEENP
INASGVDAKAILSARLSKSRRLENLIAQLPGEKKNGLFGNLIALSLGLTP
NFKSNFDLAEDAKLQLSKDTYDDDLDNLLAQIGDQYADLFLAAKNLSDAI
LLSDILRVNTEITKAPLSASMIKRYDEHHQDLTLLKALVRQQLPEKYKEI
FFDQSKNGYAGYIDGGASQEEFYKFIKPILEKMDGTEELLVKLNREDLLR
KQRTFDNGSIPHQIHLGELHAILRRQEDFYPFLKDNREKIEKILTFRIPY
YVGPLARGNSRFAWMTRKSEETITPWNFEEVVDKGASAQSFIERMTNFDK
NLPNEKVLPKHSLLYEYFTVYNELTKVKYVTEGMRKPAFLSGEQKKAIVD
LLFKTNRKVTVKQLKEDYFKKIECFDSVEISGVEDRFNASLGTYHDLLKI
IKDKDFLDNEENEDILEDIVLTLTLFEDREMIEERLKTYAHLFDDKVMKQ
LKRRRYTGWGRLSRKLINGIRDKQSGKTILDFLKSDGFANRNFMQLIHDD
SLTFKEDIQKAQVSGQGDSLHEHIANLAGSPAIKKGILQTVKVVDELVKV
MGRHKPENIVIEMARENQTTQKGQKNSRERMKRIEEGIKELGSQILKEHP
VENTQLQNEKLYLYYLQNGRDMYVDQELDINRLSDYDVDHIVPQSFLKDD
SIDNKVLTRSDKNRGKSDNVPSEEVVKKMKNYWRQLLNAKLITQRKFDNL
TKAERGGLSELDKAGFIKRQLVETRQITKHVAQILDSRMNTKYDENDKLI
REVKVITLKSKLVSDFRKDFQFYKVREINNYHHAHDAYLNAVVGTALIKK
YPKGSSGSETPGTSESATPESSGSEVEFSHEYWMRHALTLAKRARDEREV
PVGAVLVLNNRVIGEGWNRAIGLHDPTAHAEIMALRQGGLVMQNYRLIDA
TLYVTFEPCVMCAGAMIHSRIGRVVFGVRNAKTGAAGSLMDVLHYPGMNH
RVEITEGILADECAALLCYFFRMPRQLESEFVYGDYKVYDVRKMIAKSEQ
EIGKATAKYFFYSNIMNFFKTEITLANGEIRKRPLIETNGETGEIVWDKG
RDFATVRKVLSMPQVNIVKKTEVQTGGFSKESILPKRNSDKLIARKKDWD
PKKYGGFDSPTVAYSVLVVAKVEKGKSKKLKSVKELLGITIMERSSFEKN
PIDFLEAKGYKEVKKDLIIKLPKYSLFELENGRKRMLASAGELQKGNELA
LPSKYVNFLYLASHYEKLKGSPEDNEQKQLFVEQHKHYLDEIIEQISEFS
KRVILADANLDKVLSAYNKHRDKPIREQAENIIHLFTLTNLGAPAAFKYF
DTTIDRKRYTSTKEVLDATLIHQSITGLYETRIDLSQLGGD
115.2 Cas9 TadAins 1005
MDKKYSIGLAIGTNSVGWAVITDEYKVPSKKFKVLGNTDRHSIKKNLIGA
LLFDSGETAEATRLKRTARRRYTRRKNRICYLQEIFSNEMAKVDDSFFHR
LEESFLVEEDKKHERHPIFGNIVDEVAYHEKYPTIYHLRKKLVDSTDKAD
LRLIYLALAHMIKFRGHFLIEGDLNPDNSDVDKLFIQLVQTYNQLFEENP
INASGVDAKAILSARLSKSRRLENLIAQLPGEKKNGLFGNLIALSLGLTP
NFKSNFDLAEDAKLQLSKDTYDDDLDNLLAQIGDQYADLFLAAKNLSDAI
LLSDILRVNTEITKAPLSASMIKRYDEHHQDLTLLKALVRQQLPEKYKEI
FFDQSKNGYAGYIDGGASQEEFYKFIKPILEKMDGTEELLVKLNREDLLR
KQRTFDNGSIPHQIHLGELHAILRRQEDFYPFLKDNREKIEKILTFRIPY
YVGPLARGNSRFAWMTRKSEETITPWNFEEVVDKGASAQSFIERMTNFDK
NLPNEKVLPKHSLLYEYFTVYNELTKVKYVTEGMRKPAFLSGEQKKAIVD
LLFKTNRKVTVKQLKEDYFKKIECFDSVEISGVEDRFNASLGTYHDLLKI
IKDKDFLDNEENEDILEDIVLTLTLFEDREMIEERLKTYAHLFDDKVMKQ
LKRRRYTGWGRLSRKLINGIRDKQSGKTILDFLKSDGFANRNFMQLIHDD
SLTFKEDIQKAQVSGQGDSLHEHIANLAGSPAIKKGILQTVKVVDELVKV
MGRHKPENIVIEMARENQTTQKGQKNSRERMKRIEEGIKELGSQILKEHP
VENTQLQNEKLYLYYLQNGRDMYVDQELDINRLSDYDVDHIVPQSFLKDD
SIDNKVLTRSDKNRGKSDNVPSEEVVKKMKNYWRQLLNAKLITQRKFDNL
TKAERGGLSELDKAGFIKRQLVETRQITKHVAQILDSRMNTKYDENDKLI
REVKVITLKSKLVSDFRKDFQFYKVREINNYHHAHDAYLNAVVGTALIKK
YPKLGSSGSETPGTSESATPESSGSEVEFSHEYWMRHALTLAKRARDERE
VPVGAVLVLNNRVIGEGWNRAIGLHDPTAHAEIMALRQGGLVMQNYRLID
ATLYVTFEPCVMCAGAMIHSRIGRVVFGVRNAKTGAAGSLMDVLHYPGMN
HRVEITEGILADECAALLCYFFRMPRQESEFVYGDYKVYDVRKMIAKSEQ
EIGKATAKYFFYSNIMNFFKTEITLANGEIRKRPLIETNGETGEIVWDKG
RDFATVRKVLSMPQVNIVKKTEVQTGGFSKESILPKRNSDKLIARKKDWD
PKKYGGFDSPTVAYSVLVVAKVEKGKSKKLKSVKELLGITIMERSSFEKN
PIDFLEAKGYKEVKKDLIIKLPKYSLFELENGRKRMLASAGELQKGNELA
LPSKYVNFLYLASHYEKLKGSPEDNEQKQLFVEQHKHYLDEIIEQISEFS
KRVILADANLDKVLSAYNKHRDKPIREQAENIIHLFTLTNLGAPAAFKYF
DTTIDRKRYTSTKEVLDATLIHQSITGLYETRIDLSQLGGD
115.3 Cas9 TadAins 1006
MDKKYSIGLAIGTNSVGWAVITDEYKVPSKKFKVLGNTDRHSIKKNLIGA
LLEDSGETAEATRLKRTARRRYTRRKNRICYLQEIESNEMAKVDDSEEHR
LEESFLVEEDKKHERHPIFGNIVDEVAYHEKYPTIYHLRKKLVDSTDKAD
LRLIYLALAHMIKFRGHFLIEGDLNPDNSDVDKLFIQLVQTYNQLFEENP
INASGVDAKAILSARLSKSRRLENLIAQLPGEKKNGLFGNLIALSLGLTP
NFKSNFDLAEDAKLQLSKDTYDDDLDNLLAQIGDQYADLFLAAKNLSDAI
LLSDILRVNTEITKAPLSASMIKRYDEHHQDLTLLKALVRQQLPEKYKEI
FFDQSKNGYAGYIDGGASQEEFYKFIKPILEKMDGTEELLVKLNREDLLR
KQRTFDNGSIPHQIHLGELHAILRRQEDFYPFLKDNREKIEKILTFRIPY
YVGPLARGNSRFAWMTRKSEETITPWNFEEVVDKGASAQSFIERMTNFDK
NLPNEKVLPKHSLLYEYFTVYNELTKVKYVTEGMRKPAFLSGEQKKAIVD
LLFKTNRKVTVKQLKEDYFKKIECFDSVEISGVEDRFNASLGTYHDLLKI
IKDKDFLDNEENEDILEDIVLTLTLFEDREMIEERLKTYAHLFDDKVMKQ
LKRRRYTGWGRLSRKLINGIRDKQSGKTILDFLKSDGFANRNFMQLIHDD
SLTFKEDIQKAQVSGQGDSLHEHIANLAGSPAIKKGILQTVKVVDELVKV
MGRHKPENIVIEMARENQTTQKGQKNSRERMKRIEEGIKELGSQILKEHP
VENTQLQNEKLYLYYLQNGRDMYVDQELDINRLSDYDVDHIVPQSFLKDD
SIDNKVLTRSDKNRGKSDNVPSEEVVKKMKNYWRQLLNAKLITQRKFDNL
TKAERGGLSELDKAGFIKRQLVETRQITKHVAQILDSRMNTKYDENDKLI
REVKVITLKSKLVSDFRKDFQFYKVREINNYHHAHDAYLNAVVGTALIKK
YPKLEGSSGSETPGTSESATPESSGSEVEFSHEYWMRHALTLAKRARDER
EVPVGAVLVLNNRVIGEGWNRAIGLHDPTAHAEIMALRQGGLVMQNYRLI
DATLYVTFEPCVMCAGAMIHSRIGRVVFGVRNAKTGAAGSLMDVLHYPGM
NHRVEITEGILADECAALLCYFFRMPRQSEFVYGDYKVYDVRKMIAKSEQ
EIGKATAKYFFYSNIMNFFKTEITLANGEIRKRPLIETNGETGEIVWDKG
RDFATVRKVLSMPQVNIVKKTEVQTGGFSKESILPKRNSDKLIARKKDWD
PKKYGGFDSPTVAYSVLVVAKVEKGKSKKLKSVKELLGITIMERSSFEKN
PIDFLEAKGYKEVKKDLIIKLPKYSLFELENGRKRMLASAGELQKGNELA
LPSKYVNFLYLASHYEKLKGSPEDNEQKQLFVEQHKHYLDEIIEQISEFS
KRVILADANLDKVLSAYNKHRDKPIREQAENIIHLFTLTNLGAPAAFKYF
DTTIDRKRYTSTKEVLDATLIHQSITGLYETRIDLSQLGGD
115.4 Cas9 TadAins 1007
MDKKYSIGLAIGTNSVGWAVITDEYKVPSKKFKVLGNTDRHSIKKNLIGA
LLFDSGETAEATRLKRTARRRYTRRKNRICYLQEIFSNEMAKVDDSFFHR
LEESFLVEEDKKHERHPIFGNIVDEVAYHEKYPTIYHLRKKLVDSTDKAD
LRLIYLALAHMIKFRGHFLIEGDLNPDNSDVDKLFIQLVQTYNQLFEENP
INASGVDAKAILSARLSKSRRLENLIAQLPGEKKNGLFGNLIALSLGLTP
NFKSNFDLAEDAKLQLSKDTYDDDLDNLLAQIGDQYADLFLAAKNLSDAI
LLSDILRVNTEITKAPLSASMIKRYDEHHQDLTLLKALVRQQLPEKYKEI
FFDQSKNGYAGYIDGGASQEEFYKFIKPILEKMDGTEELLVKLNREDLLR
KQRTFDNGSIPHQIHLGELHAILRRQEDFYPFLKDNREKIEKILTFRIPY
YVGPLARGNSRFAWMTRKSEETITPWNFEEVVDKGASAQSFIERMTNFDK
NLPNEKVLPKHSLLYEYFTVYNELTKVKYVTEGMRKPAFLSGEQKKAIVD
LLFKTNRKVTVKQLKEDYFKKIECFDSVEISGVEDRFNASLGTYHDLLKI
IKDKDFLDNEENEDILEDIVLTLTLFEDREMIEERLKTYAHLFDDKVMKQ
LKRRRYTGWGRLSRKLINGIRDKQSGKTILDFLKSDGFANRNFMQLIHDD
SLTFKEDIQKAQVSGQGDSLHEHIANLAGSPAIKKGILQTVKVVDELVKV
MGRHKPENIVIEMARENQTTQKGQKNSRERMKRIEEGIKELGSQILKEHP
VENTQLQNEKLYLYYLQNGRDMYVDQELDINRLSDYDVDHIVPQSFLKDD
SIDNKVLTRSDKNRGKSDNVPSEEVVKKMKNYWRQLLNAKLITQRKFDNL
TKAERGGLSELDKAGFIKRQLVETRQITKHVAQILDSRMNTKYDENDKLI
REVKVITLKSKLVSDFRKDFQFYKVREINNYHHAHDAYLNAVVGTALIKK
YPKLESGSSGSETPGTSESATPESSGSEVEFSHEYWMRHALTLAKRARDE
REVPVGAVLVLNNRVIGEGWNRAIGLHDPTAHAEIMALRQGGLVMQNYRL
IDATLYVTFEPCVMCAGAMIHSRIGRVVFGVRNAKTGAAGSLMDVLHYPG
MNHRVEITEGILADECAALLCYFFRMPRQEFVYGDYKVYDVRKMIAKSEQ
EIGKATAKYFFYSNIMNFFKTEITLANGEIRKRPLIETNGETGEIVWDKG
RDFATVRKVLSMPQVNIVKKTEVQTGGFSKESILPKRNSDKLIARKKDWD
PKKYGGFDSPTVAYSVLVVAKVEKGKSKKLKSVKELLGITIMERSSFEKN
PIDFLEAKGYKEVKKDLIIKLPKYSLFELENGRKRMLASAGELQKGNELA
LPSKYVNFLYLASHYEKLKGSPEDNEQKQLFVEQHKHYLDEIIEQISEFS
KRVILADANLDKVLSAYNKHRDKPIREQAENIIHLFTLTNLGAPAAFKYF
DTTIDRKRYTSTKEVLDATLIHQSITGLYETRIDLSQLGGD
116.1 Cas9 TadAins C-term truncate2 792
MDKKYSIGLAIGTNSVGWAVITDEYKVPSKKFKVLGNTDRHSIKKNLIGA
LLEDSGETAEATRLKRTARRRYTRRKNRICYLQEIESNEMAKVDDSEEHR
LEESFLVEEDKKHERHPIFGNIVDEVAYHEKYPTIYHLRKKLVDSTDKAD
LRLIYLALAHMIKFRGHFLIEGDLNPDNSDVDKLFIQLVQTYNQLFEENP
INASGVDAKAILSARLSKSRRLENLIAQLPGEKKNGLFGNLIALSLGLTP
NFKSNFDLAEDAKLQLSKDTYDDDLDNLLAQIGDQYADLFLAAKNLSDAI
LLSDILRVNTEITKAPLSASMIKRYDEHHQDLTLLKALVRQQLPEKYKEI
FFDQSKNGYAGYIDGGASQEEFYKFIKPILEKMDGTEELLVKLNREDLLR
KQRTFDNGSIPHQIHLGELHAILRRQEDFYPFLKDNREKIEKILTFRIPY
YVGPLARGNSRFAWMTRKSEETITPWNFEEVVDKGASAQSFIERMTNFDK
NLPNEKVLPKHSLLYEYFTVYNELTKVKYVTEGMRKPAFLSGEQKKAIVD
LLFKTNRKVTVKQLKEDYFKKIECFDSVEISGVEDRFNASLGTYHDLLKI
IKDKDFLDNEENEDILEDIVLTLTLFEDREMIEERLKTYAHLFDDKVMKQ
LKRRRYTGWGRLSRKLINGIRDKQSGKTILDFLKSDGFANRNFMQLIHDD
SLTFKEDIQKAQVSGQGDSLHEHIANLAGSPAIKKGILQTVKVVDELVKV
MGRHKPENIVIEMARENQTTQKGQKNSRERMKRIEEGIKELGGSSGSETP
GTSESATPESSGSEVEFSHEYWMRHALTLAKRARDEREVPVGAVLVLNNR
VIGEGWNRAIGLHDPTAHAEIMALRQGGLVMQNYRLIDATLYVTEEPCVM
CAGAMIHSRIGRVVFGVRNAKTGAAGSLMDVLHYPGMNHRVEITEGILAD
ECAALLCYFFRMPRQSQILKEHPVENTQLQNEKLYLYYLQNGRDMYVDQE
LDINRLSDYDVDHIVPQSFLKDDSIDNKVLTRSDKNRGKSDNVPSEEVVK
KMKNYWRQLLNAKLITQRKFDNLTKAERGGLSELDKAGFIKRQLVETRQI
TKHVAQILDSRMNTKYDENDKLIREVKVITLKSKLVSDFRKDFQFYKVRE
INNYHHAHDAYLNAVVGTALIKKYPKLESEFVYGDYKVYDVRKMIAKSEQ
EIGKATAKYFFYSNIMNFFKTEITLANGEIRKRPLIETNGETGEIVWDKG
RDFATVRKVLSMPQVNIVKKTEVQTGGFSKESILPKRNSDKLIARKKDWD
PKKYGGFDSPTVAYSVLVVAKVEKGKSKKLKSVKELLGITIMERSSFEKN
PIDFLEAKGYKEVKKDLIIKLPKYSLFELENGRKRMLASAGELQKGNELA
LPSKYVNFLYLASHYEKLKGSPEDNEQKQLFVEQHKHYLDEIIEQISEFS
KRVILADANLDKVLSAYNKHRDKPIREQAENIIHLFTLTNLGAPAAFKYF
DTTIDRKRYTSTKEVLDATLIHQSITGLYETRIDLSQLGGD
116.2 Cas9 TadAins C-term truncate2 791
MDKKYSIGLAIGTNSVGWAVITDEYKVPSKKFKVLGNTDRHSIKKNLIGA
LLFDSGETAEATRLKRTARRRYTRRKNRICYLQEIFSNEMAKVDDSFFHR
LEESFLVEEDKKHERHPIFGNIVDEVAYHEKYPTIYHLRKKLVDSTDKAD
LRLIYLALAHMIKFRGHFLIEGDLNPDNSDVDKLFIQLVQTYNQLFEENP
INASGVDAKAILSARLSKSRRLENLIAQLPGEKKNGLFGNLIALSLGLTP
NFKSNFDLAEDAKLQLSKDTYDDDLDNLLAQIGDQYADLFLAAKNLSDAI
LLSDILRVNTEITKAPLSASMIKRYDEHHQDLTLLKALVRQQLPEKYKEI
FFDQSKNGYAGYIDGGASQEEFYKFIKPILEKMDGTEELLVKLNREDLLR
KQRTFDNGSIPHQIHLGELHAILRRQEDFYPFLKDNREKIEKILTFRIPY
YVGPLARGNSRFAWMTRKSEETITPWNFEEVVDKGASAQSFIERMTNFDK
NLPNEKVLPKHSLLYEYFTVYNELTKVKYVTEGMRKPAFLSGEQKKAIVD
LLFKTNRKVTVKQLKEDYFKKIECFDSVEISGVEDRFNASLGTYHDLLKI
IKDKDFLDNEENEDILEDIVLTLTLFEDREMIEERLKTYAHLFDDKVMKQ
LKRRRYTGWGRLSRKLINGIRDKQSGKTILDFLKSDGFANRNFMQLIHDD
SLTFKEDIQKAQVSGQGDSLHEHIANLAGSPAIKKGILQTVKVVDELVKV
MGRHKPENIVIEMARENQTTQKGQKNSRERMKRIEEGIKELGSSGSETPG
TSESATPESSGSEVEESHEYWMRHALTLAKRARDEREVPVGAVLVLNNRV
IGEGWNRAIGLHDPTAHAEIMALRQGGLVMQNYRLIDATLYVTEEPCVMC
AGAMIHSRIGRVVFGVRNAKTGAAGSLMDVLHYPGMNHRVEITEGILADE
CAALLCYFFRMPRQGSQILKEHPVENTQLQNEKLYLYYLQNGRDMYVDQE
LDINRLSDYDVDHIVPQSFLKDDSIDNKVLTRSDKNRGKSDNVPSEEVVK
KMKNYWRQLLNAKLITQRKFDNLTKAERGGLSELDKAGFIKRQLVETRQI
TKHVAQILDSRMNTKYDENDKLIREVKVITLKSKLVSDFRKDFQFYKVRE
INNYHHAHDAYLNAVVGTALIKKYPKLESEFVYGDYKVYDVRKMIAKSEQ
EIGKATAKYFFYSNIMNFFKTEITLANGEIRKRPLIETNGETGEIVWDKG
RDFATVRKVLSMPQVNIVKKTEVQTGGFSKESILPKRNSDKLIARKKDWD
PKKYGGFDSPTVAYSVLVVAKVEKGKSKKLKSVKELLGITIMERSSFEKN
PIDFLEAKGYKEVKKDLIIKLPKYSLFELENGRKRMLASAGELQKGNELA
LPSKYVNFLYLASHYEKLKGSPEDNEQKQLFVEQHKHYLDEIIEQISEFS
KRVILADANLDKVLSAYNKHRDKPIREQAENIIHLFTLTNLGAPAAFKYF
DTTIDRKRYTSTKEVLDATLIHQSITGLYETRIDLSQLGGD
116.3 Cas9 TadAins C-term truncate2 790
MDKKYSIGLAIGTNSVGWAVITDEYKVPSKKFKVLGNTDRHSIKKNLIGA
LLFDSGETAEATRLKRTARRRYTRRKNRICYLQEIFSNEMAKVDDSFFHR
LEESFLVEEDKKHERHPIFGNIVDEVAYHEKYPTIYHLRKKLVDSTDKAD
LRLIYLALAHMIKFRGHFLIEGDLNPDNSDVDKLFIQLVQTYNQLFEENP
INASGVDAKAILSARLSKSRRLENLIAQLPGEKKNGLFGNLIALSLGLTP
NFKSNFDLAEDAKLQLSKDTYDDDLDNLLAQIGDQYADLFLAAKNLSDAI
LLSDILRVNTEITKAPLSASMIKRYDEHHQDLTLLKALVRQQLPEKYKEI
FFDQSKNGYAGYIDGGASQEEFYKFIKPILEKMDGTEELLVKLNREDLLR
KQRTFDNGSIPHQIHLGELHAILRRQEDFYPFLKDNREKIEKILTFRIPY
YVGPLARGNSRFAWMTRKSEETITPWNFEEVVDKGASAQSFIERMTNFDK
NLPNEKVLPKHSLLYEYFTVYNELTKVKYVTEGMRKPAFLSGEQKKAIVD
LLFKTNRKVTVKQLKEDYFKKIECFDSVEISGVEDRFNASLGTYHDLLKI
IKDKDFLDNEENEDILEDIVLTLTLFEDREMIEERLKTYAHLFDDKVMKQ
LKRRRYTGWGRLSRKLINGIRDKQSGKTILDFLKSDGFANRNFMQLIHDD
SLTFKEDIQKAQVSGQGDSLHEHIANLAGSPAIKKGILQTVKVVDELVKV
MGRHKPENIVIEMARENQTTQKGQKNSRERMKRIEEGIKEGSSGSETPGT
SESATPESSGSEVEESHEYWMRHALTLAKRARDEREVPVGAVLVLNNRVI
GEGWNRAIGLHDPTAHAEIMALRQGGLVMQNYRLIDATLYVTEEPCVMCA
GAMIHSRIGRVVFGVRNAKTGAAGSLMDVLHYPGMNHRVEITEGILADEC
AALLCYFFRMPRQLGSQILKEHPVENTQLQNEKLYLYYLQNGRDMYVDQE
LDINRLSDYDVDHIVPQSFLKDDSIDNKVLTRSDKNRGKSDNVPSEEVVK
KMKNYWRQLLNAKLITQRKFDNLTKAERGGLSELDKAGFIKRQLVETRQI
TKHVAQILDSRMNTKYDENDKLIREVKVITLKSKLVSDFRKDFQFYKVRE
INNYHHAHDAYLNAVVGTALIKKYPKLESEFVYGDYKVYDVRKMIAKSEQ
EIGKATAKYFFYSNIMNFFKTEITLANGEIRKRPLIETNGETGEIVWDKG
RDFATVRKVLSMPQVNIVKKTEVQTGGFSKESILPKRNSDKLIARKKDWD
PKKYGGFDSPTVAYSVLVVAKVEKGKSKKLKSVKELLGITIMERSSFEKN
PIDFLEAKGYKEVKKDLIIKLPKYSLFELENGRKRMLASAGELQKGNELA
LPSKYVNFLYLASHYEKLKGSPEDNEQKQLFVEQHKHYLDEIIEQISEFS
KRVILADANLDKVLSAYNKHRDKPIREQAENIIHLFTLTNLGAPAAFKYF
DTTIDRKRYTSTKEVLDATLIHQSITGLYETRIDLSQLGGD
117 Cas9 delta 1017-1069
MDKKYSIGLAIGTNSVGWAVITDEYKVPSKKFKVLGNTDRHSIKKNLIGA
LLFDSGETAEATRLKRTARRRYTRRKNRICYLQEIFSNEMAKVDDSFFHR
LEESFLVEEDKKHERHPIFGNIVDEVAYHEKYPTIYHLRKKLVDSTDKAD
LRLIYLALAHMIKFRGHFLIEGDLNPDNSDVDKLFIQLVQTYNQLFEENP
INASGVDAKAILSARLSKSRRLENLIAQLPGEKKNGLFGNLIALSLGLTP
NFKSNFDLAEDAKLQLSKDTYDDDLDNLLAQIGDQYADLFLAAKNLSDAI
LLSDILRVNTEITKAPLSASMIKRYDEHHQDLTLLKALVRQQLPEKYKEI
FFDQSKNGYAGYIDGGASQEEFYKFIKPILEKMDGTEELLVKLNREDLLR
KQRTFDNGSIPHQIHLGELHAILRRQEDFYPFLKDNREKIEKILTFRIPY
YVGPLARGNSRFAWMTRKSEETITPWNFEEVVDKGASAQSFIERMTNFDK
NLPNEKVLPKHSLLYEYFTVYNELTKVKYVTEGMRKPAFLSGEQKKAIVD
LLFKTNRKVTVKQLKEDYFKKIECFDSVEISGVEDRFNASLGTYHDLLKI
IKDKDFLDNEENEDILEDIVLTLTLFEDREMIEERLKTYAHLFDDKVMKQ
LKRRRYTGWGRLSRKLINGIRDKQSGKTILDFLKSDGFANRNFMQLIHDD
SLTFKEDIQKAQVSGQGDSLHEHIANLAGSPAIKKGILQTVKVVDELVKV
MGRHKPENIVIEMARENQTTQKGQKNSRERMKRIEEGIKELGSQILKEHP
VENTQLQNEKLYLYYLQNGRDMYVDQELDINRLSDYDVDHIVPQSFLKDD
SIDNKVLTRSDKNRGKSDNVPSEEVVKKMKNYWRQLLNAKLITQRKFDNL
TKAERGGLSELDKAGFIKRQLVETRQITKHVAQILDSRMNTKYDENDKLI
REVKVITLKSKLVSDFRKDFQFYKVREINNYHHAHDAYLNAVVGTALIKK
YPKLESEFVYGDYKVYSSGSEVEFSHEYWMRHALTLAKRARDEREVPVGA
VLVLNNRVIGEGWNRAIGLHDPTAHAEIMALRQGGLVMQNYRLIDATLYV
TFEPCVMCAGAMIHSRIGRVVFGVRNAKTGAAGSLMDVLHYPGMNHRVEI
TEGILADECAALLCYFFRMPRQVFNAQKKAQSSTDGEIVWDKGRDFATVR
KVLSMPQVNIVKKTEVQTGGFSKESILPKRNSDKLIARKKDWDPKKYGGF
DSPTVAYSVLVVAKVEKGKSKKLKSVKELLGITIMERSSFEKNPIDFLEA
KGYKEVKKDLIIKLPKYSLFELENGRKRMLASAGELQKGNELALPSKYVN
FLYLASHYEKLKGSPEDNEQKQLFVEQHKHYLDEIIEQISEFSKRVILAD
ANLDKVLSAYNKHRDKPIREQAENIIHLFTLTNLGAPAAFKYFDTTIDRK
RYTSTKEVLDATLIHQSITGLYETRIDLSQLGGD
118 Cas9 TadA-CP116ins 1067
MDKKYSIGLAIGTNSVGWAVITDEYKVPSKKFKVLGNTDRHSIKKNLIGA
LLFDSGETAEATRLKRTARRRYTRRKNRICYLQEIFSNEMAKVDDSFFHR
LEESFLVEEDKKHERHPIFGNIVDEVAYHEKYPTIYHLRKKLVDSTDKAD
LRLIYLALAHMIKFRGHFLIEGDLNPDNSDVDKLFIQLVQTYNQLFEENP
INASGVDAKAILSARLSKSRRLENLIAQLPGEKKNGLFGNLIALSLGLTP
NFKSNFDLAEDAKLQLSKDTYDDDLDNLLAQIGDQYADLFLAAKNLSDAI
LLSDILRVNTEITKAPLSASMIKRYDEHHQDLTLLKALVRQQLPEKYKEI
FFDQSKNGYAGYIDGGASQEEFYKFIKPILEKMDGTEELLVKLNREDLLR
KQRTFDNGSIPHQIHLGELHAILRRQEDFYPFLKDNREKIEKILTFRIPY
YVGPLARGNSRFAWMTRKSEETITPWNFEEVVDKGASAQSFIERMTNFDK
NLPNEKVLPKHSLLYEYFTVYNELTKVKYVTEGMRKPAFLSGEQKKAIVD
LLFKTNRKVTVKQLKEDYFKKIECFDSVEISGVEDRFNASLGTYHDLLKI
IKDKDFLDNEENEDILEDIVLTLTLFEDREMIEERLKTYAHLFDDKVMKQ
LKRRRYTGWGRLSRKLINGIRDKQSGKTILDFLKSDGFANRNFMQLIHDD
SLTFKEDIQKAQVSGQGDSLHEHIANLAGSPAIKKGILQTVKVVDELVKV
MGRHKPENIVIEMARENQTTQKGQKNSRERMKRIEEGIKELGSQILKEHP
VENTQLQNEKLYLYYLQNGRDMYVDQELDINRLSDYDVDHIVPQSFLKDD
SIDNKVLTRSDKNRGKSDNVPSEEVVKKMKNYWRQLLNAKLITQRKFDNL
TKAERGGLSELDKAGFIKRQLVETRQITKHVAQILDSRMNTKYDENDKLI
REVKVITLKSKLVSDFRKDFQFYKVREINNYHHAHDAYLNAVVGTALIKK
YPKLESEFVYGDYKVYDVRKMIAKSEQEIGKATAKYFFYSNIMNFFKTEI
TLANGEIRKRPLIETNMNHRVEITEGILADECAALLCYFFRMPRQVFNAQ
KKAQSSTDGSSGSETPGTSESATPESSGSEVEFSHEYWMRHALTLAKRAR
DEREVPVGAVLVLNNRVIGEGWNRAIGLHDPTAHAEIMALRQGGLVMQNY
RLIDATLYVTFEPCVMCAGAMIHSRIGRVVFGVRNAKTGAAGSLMDVLHY
PGGETGEIVWDKGRDFATVRKVLSMPQVNIVKKTEVQTGGFSKESILPKR
NSDKLIARKKDWDPKKYGGFDSPTVAYSVLVVAKVEKGKSKKLKSVKELL
GITIMERSSFEKNPIDFLEAKGYKEVKKDLIIKLPKYSLEELENGRKRML
ASAGELQKGNELALPSKYVNFLYLASHYEKLKGSPEDNEQKQLFVEQHKH
YLDEIIEQISEFSKRVILADANLDKVLSAYNKHRDKPIREQAENIIHLET
LTNLGAPAAFKYFDTTIDRKRYTSTKEVLDATLIHQSITGLYETRIDLSQ
LGGD
119 Cas9 TadAins 701
MDKKYSIGLAIGTNSVGWAVITDEYKVPSKKFKVLGNTDRHSIKKNLIGA
LLFDSGETAEATRLKRTARRRYTRRKNRICYLQEIFSNEMAKVDDSFFHR
LEESFLVEEDKKHERHPIFGNIVDEVAYHEKYPTIYHLRKKLVDSTDKAD
LRLIYLALAHMIKFRGHFLIEGDLNPDNSDVDKLFIQLVQTYNQLFEENP
INASGVDAKAILSARLSKSRRLENLIAQLPGEKKNGLFGNLIALSLGLTP
NFKSNFDLAEDAKLQLSKDTYDDDLDNLLAQIGDQYADLFLAAKNLSDAI
LLSDILRVNTEITKAPLSASMIKRYDEHHQDLTLLKALVRQQLPEKYKEI
FFDQSKNGYAGYIDGGASQEEFYKFIKPILEKMDGTEELLVKLNREDLLR
KQRTFDNGSIPHQIHLGELHAILRRQEDFYPFLKDNREKIEKILTFRIPY
YVGPLARGNSRFAWMTRKSEETITPWNFEEVVDKGASAQSFIERMTNFDK
NLPNEKVLPKHSLLYEYFTVYNELTKVKYVTEGMRKPAFLSGEQKKAIVD
LLFKTNRKVTVKQLKEDYFKKIECFDSVEISGVEDRFNASLGTYHDLLKI
IKDKDFLDNEENEDILEDIVLTLTLFEDREMIEERLKTYAHLFDDKVMKQ
LKRRRYTGWGRLSRKLINGIRDKQSGKTILDFLKSDGFANRNFMQLIHDD
SGSSGSETPGTSESATPESSGSEVEFSHEYWMRHALTLAKRARDEREVPV
GAVLVLNNRVIGEGWNRAIGLHDPTAHAEIMALRQGGLVMQNYRLIDATL
YVTFEPCVMCAGAMIHSRIGRVVFGVRNAKTGAAGSLMDVLHYPGMNHRV
EITEGILADECAALLCYFFRMPRQVFNAQKKAQSSTDLTFKEDIQKAQVS
GQGDSLHEHIANLAGSPAIKKGILQTVKVVDELVKVMGRHKPENIVIEMA
RENQTTQKGQKNSRERMKRIEEGIKELGSQILKEHPVENTQLQNEKLYLY
YLQNGRDMYVDQELDINRLSDYDVDHIVPQSFLKDDSIDNKVLTRSDKNR
GKSDNVPSEEVVKKMKNYWRQLLNAKLITQRKFDNLTKAERGGLSELDKA
GFIKRQLVETRQITKHVAQILDSRMNTKYDENDKLIREVKVITLKSKLVS
DFRKDFQFYKVREINNYHHAHDAYLNAVVGTALIKKYPKLESEFVYGDYK
VYDVRKMIAKSEQEIGKATAKYFFYSNIMNFFKTEITLANGEIRKRPLIE
TNGETGEIVWDKGRDFATVRKVLSMPQVNIVKKTEVQTGGFSKESILPKR
NSDKLIARKKDWDPKKYGGFDSPTVAYSVLVVAKVEKGKSKKLKSVKELL
GITIMERSSFEKNPIDFLEAKGYKEVKKDLIIKLPKYSLEELENGRKRML
ASAGELQKGNELALPSKYVNFLYLASHYEKLKGSPEDNEQKQLFVEQHKH
YLDEIIEQISEFSKRVILADANLDKVLSAYNKHRDKPIREQAENIIHLET
LTNLGAPAAFKYFDTTIDRKRYTSTKEVLDATLIHQSITGLYETRIDLSQ
LGGD
120 Cas9 TadACP136ins 1248
MDKKYSIGLAIGTNSVGWAVITDEYKVPSKKFKVLGNTDRHSIKKNLIGA
LLFDSGETAEATRLKRTARRRYTRRKNRICYLQEIFSNEMAKVDDSFFHR
LEESFLVEEDKKHERHPIFGNIVDEVAYHEKYPTIYHLRKKLVDSTDKAD
LRLIYLALAHMIKFRGHFLIEGDLNPDNSDVDKLFIQLVQTYNQLFEENP
INASGVDAKAILSARLSKSRRLENLIAQLPGEKKNGLFGNLIALSLGLTP
NFKSNFDLAEDAKLQLSKDTYDDDLDNLLAQIGDQYADLFLAAKNLSDAI
LLSDILRVNTEITKAPLSASMIKRYDEHHQDLTLLKALVRQQLPEKYKEI
FFDQSKNGYAGYIDGGASQEEFYKFIKPILEKMDGTEELLVKLNREDLLR
KQRTFDNGSIPHQIHLGELHAILRRQEDFYPFLKDNREKIEKILTFRIPY
YVGPLARGNSRFAWMTRKSEETITPWNFEEVVDKGASAQSFIERMTNFDK
NLPNEKVLPKHSLLYEYFTVYNELTKVKYVTEGMRKPAFLSGEQKKAIVD
LLFKTNRKVTVKQLKEDYFKKIECFDSVEISGVEDRFNASLGTYHDLLKI
IKDKDFLDNEENEDILEDIVLTLTLFEDREMIEERLKTYAHLFDDKVMKQ
LKRRRYTGWGRLSRKLINGIRDKQSGKTILDFLKSDGFANRNFMQLIHDD
SLTFKEDIQKAQVSGQGDSLHEHIANLAGSPAIKKGILQTVKVVDELVKV
MGRHKPENIVIEMARENQTTQKGQKNSRERMKRIEEGIKELGSQILKEHP
VENTQLQNEKLYLYYLQNGRDMYVDQELDINRLSDYDVDHIVPQSFLKDD
STDNKVLTRSDKNRGKSDNVPSEEVVKKMKNYWRQLLNAKLITQRKFDNL
TKAERGGLSELDKAGFIKRQLVETRQITKHVAQILDSRMNTKYDENDKLI
REVKVITLKSKLVSDFRKDFQFYKVREINNYHHAHDAYLNAVVGTALIKK
YPKLESEFVYGDYKVYDVRKMIAKSEQEIGKATAKYFFYSNIMNFFKTEI
TLANGEIRKRPLIETNGETGEIVWDKGRDFATVRKVLSMPQVNIVKKTEV
QTGGFSKESILPKRNSDKLIARKKDWDPKKYGGFDSPTVAYSVLVVAKVE
KGKSKKLKSVKELLGITIMERSSFEKNPIDFLEAKGYKEVKKDLIIKLPK
YSLFELENGRKRMLASAGELQKGNELALPSKYVNFLYLASHYEKLKGSMN
HRVEITEGILADECAALLCYFFRMPRQVFNAQKKAQSSTDGSSGSETPGT
SESATPESSGSEVEESHEYWMRHALTLAKRARDEREVPVGAVLVLNNRVI
GEGWNRAIGLHDPTAHAEIMALRQGGLVMQNYRLIDATLYVTEEPCVMCA
GAMIHSRIGRVVFGVRNAKTGAAGSLMDVLHYPGPEDNEQKQLFVEQHKH
YLDEIIEQISEFSKRVILADANLDKVLSAYNKHRDKPIREQAENIIHLFT
LTNLGAPAAFKYFDTTIDRKRYTSTKEVLDATLIHQSITGLYETRIDLSQ
LGGD
121 Cas9 TadACP136ins 1052
MDKKYSIGLAIGTNSVGWAVITDEYKVPSKKFKVLGNTDRHSIKKNLIGA
LLFDSGETAEATRLKRTARRRYTRRKNRICYLQEIFSNEMAKVDDSFFHR
LEESFLVEEDKKHERHPIFGNIVDEVAYHEKYPTIYHLRKKLVDSTDKAD
LRLIYLALAHMIKFRGHFLIEGDLNPDNSDVDKLFIQLVQTYNQLFEENP
INASGVDAKAILSARLSKSRRLENLIAQLPGEKKNGLFGNLIALSLGLTP
NFKSNFDLAEDAKLQLSKDTYDDDLDNLLAQIGDQYADLFLAAKNLSDAI
LLSDILRVNTEITKAPLSASMIKRYDEHHQDLTLLKALVRQQLPEKYKEI
FFDQSKNGYAGYIDGGASQEEFYKFIKPILEKMDGTEELLVKLNREDLLR
KQRTFDNGSIPHQIHLGELHAILRRQEDFYPFLKDNREKIEKILTFRIPY
YVGPLARGNSRFAWMTRKSEETITPWNFEEVVDKGASAQSFIERMTNFDK
NLPNEKVLPKHSLLYEYFTVYNELTKVKYVTEGMRKPAFLSGEQKKAIVD
LLFKTNRKVTVKQLKEDYFKKIECFDSVEISGVEDRFNASLGTYHDLLKI
IKDKDFLDNEENEDILEDIVLTLTLFEDREMIEERLKTYAHLFDDKVMKQ
LKRRRYTGWGRLSRKLINGIRDKQSGKTILDFLKSDGFANRNFMQLIHDD
SLTFKEDIQKAQVSGQGDSLHEHIANLAGSPAIKKGILQTVKVVDELVKV
MGRHKPENIVIEMARENQTTQKGQKNSRERMKRIEEGIKELGSQILKEHP
VENTQLQNEKLYLYYLQNGRDMYVDQELDINRLSDYDVDHIVPQSFLKDD
SIDNKVLTRSDKNRGKSDNVPSEEVVKKMKNYWRQLLNAKLITQRKFDNL
TKAERGGLSELDKAGFIKRQLVETRQITKHVAQILDSRMNTKYDENDKLI
REVKVITLKSKLVSDFRKDFQFYKVREINNYHHAHDAYLNAVVGTALIKK
YPKLESEFVYGDYKVYDVRKMIAKSEQEIGKATAKYFFYSNIMNFFKTEI
TLAMNHRVEITEGILADECAALLCYFFRMPRQVFNAQKKAQSSTDGSSGS
ETPGTSESATPESSGSEVEFSHEYWMRHALTLAKRARDEREVPVGAVLVL
NNRVIGEGWNRAIGLHDPTAHAEIMALRQGGLVMQNYRLIDATLYVTEEP
CVMCAGAMIHSRIGRVVFGVRNAKTGAAGSLMDVLHYPGNGEIRKRPLIE
TNGETGEIVWDKGRDFATVRKVLSMPQVNIVKKTEVQTGGFSKESILPKR
NSDKLIARKKDWDPKKYGGFDSPTVAYSVLVVAKVEKGKSKKLKSVKELL
GITIMERSSFEKNPIDFLEAKGYKEVKKDLIIKLPKYSLEELENGRKRML
ASAGELQKGNELALPSKYVNFLYLASHYEKLKGSPEDNEQKQLFVEQHKH
YLDEIIEQISEFSKRVILADANLDKVLSAYNKHRDKPIREQAENIIHLET
LTNLGAPAAFKYFDTTIDRKRYTSTKEVLDATLIHQSITGLYETRIDLSQ
LGGD
122 Cas9 TadACP136ins 1041
MDKKYSIGLAIGTNSVGWAVITDEYKVPSKKFKVLGNTDRHSIKKNLIGA
LLFDSGETAEATRLKRTARRRYTRRKNRICYLQEIFSNEMAKVDDSFFHR
LEESFLVEEDKKHERHPIFGNIVDEVAYHEKYPTIYHLRKKLVDSTDKAD
LRLIYLALAHMIKFRGHFLIEGDLNPDNSDVDKLFIQLVQTYNQLFEENP
INASGVDAKAILSARLSKSRRLENLIAQLPGEKKNGLFGNLIALSLGLTP
NFKSNFDLAEDAKLQLSKDTYDDDLDNLLAQIGDQYADLFLAAKNLSDAI
LLSDILRVNTEITKAPLSASMIKRYDEHHQDLTLLKALVRQQLPEKYKEI
FFDQSKNGYAGYIDGGASQEEFYKFIKPILEKMDGTEELLVKLNREDLLR
KQRTFDNGSIPHQIHLGELHAILRRQEDFYPFLKDNREKIEKILTFRIPY
YVGPLARGNSRFAWMTRKSEETITPWNFEEVVDKGASAQSFIERMTNFDK
NLPNEKVLPKHSLLYEYFTVYNELTKVKYVTEGMRKPAFLSGEQKKAIVD
LLFKTNRKVTVKQLKEDYFKKIECFDSVEISGVEDRFNASLGTYHDLLKI
IKDKDFLDNEENEDILEDIVLTLTLFEDREMIEERLKTYAHLFDDKVMKQ
LKRRRYTGWGRLSRKLINGIRDKQSGKTILDFLKSDGFANRNFMQLIHDD
SLTFKEDIQKAQVSGQGDSLHEHIANLAGSPAIKKGILQTVKVVDELVKV
MGRHKPENIVIEMARENQTTQKGQKNSRERMKRIEEGIKELGSQILKEHP
VENTQLQNEKLYLYYLQNGRDMYVDQELDINRLSDYDVDHIVPQSFLKDD
SIDNKVLTRSDKNRGKSDNVPSEEVVKKMKNYWRQLLNAKLITQRKFDNL
TKAERGGLSELDKAGFIKRQLVETRQITKHVAQILDSRMNTKYDENDKLI
REVKVITLKSKLVSDFRKDFQFYKVREINNYHHAHDAYLNAVVGTALIKK
YPKLESEFVYGDYKVYDVRKMIAKSEQEIGKATAKYFFYSMNHRVEITEG
ILADECAALLCYFFRMPRQVFNAQKKAQSSTDGSSGSETPGTSESATPES
SGSEVEFSHEYWMRHALTLAKRARDEREVPVGAVLVLNNRVIGEGWNRAI
GLHDPTAHAEIMALRQGGLVMQNYRLIDATLYVTFEPCVMCAGAMIHSRI
GRVVFGVRNAKTGAAGSLMDVLHYPGNIMNFFKTEITLANGEIRKRPLIE
TNGETGEIVWDKGRDFATVRKVLSMPQVNIVKKTEVQTGGFSKESILPKR
NSDKLIARKKDWDPKKYGGFDSPTVAYSVLVVAKVEKGKSKKLKSVKELL
GITIMERSSFEKNPIDFLEAKGYKEVKKDLIIKLPKYSLEELENGRKRML
ASAGELQKGNELALPSKYVNFLYLASHYEKLKGSPEDNEQKQLFVEQHKH
YLDEIIEQISEFSKRVILADANLDKVLSAYNKHRDKPIREQAENIIHLET
LTNLGAPAAFKYFDTTIDRKRYTSTKEVLDATLIHQSITGLYETRIDLSQ
LGGD
123 Cas9 TadACP139ins 1299
MDKKYSIGLAIGTNSVGWAVITDEYKVPSKKFKVLGNTDRHSIKKNLIGA
LLFDSGETAEATRLKRTARRRYTRRKNRICYLQEIFSNEMAKVDDSFFHR
LEESFLVEEDKKHERHPIFGNIVDEVAYHEKYPTIYHLRKKLVDSTDKAD
LRLIYLALAHMIKFRGHFLIEGDLNPDNSDVDKLFIQLVQTYNQLFEENP
INASGVDAKAILSARLSKSRRLENLIAQLPGEKKNGLFGNLIALSLGLTP
NFKSNFDLAEDAKLQLSKDTYDDDLDNLLAQIGDQYADLFLAAKNLSDAI
LLSDILRVNTEITKAPLSASMIKRYDEHHQDLTLLKALVRQQLPEKYKEI
FFDQSKNGYAGYIDGGASQEEFYKFIKPILEKMDGTEELLVKLNREDLLR
KQRTFDNGSIPHQIHLGELHAILRRQEDFYPFLKDNREKIEKILTFRIPY
YVGPLARGNSRFAWMTRKSEETITPWNFEEVVDKGASAQSFIERMTNFDK
NLPNEKVLPKHSLLYEYFTVYNELTKVKYVTEGMRKPAFLSGEQKKAIVD
LLFKTNRKVTVKQLKEDYFKKIECFDSVEISGVEDRFNASLGTYHDLLKI
IKDKDFLDNEENEDILEDIVLTLTLFEDREMIEERLKTYAHLFDDKVMKQ
LKRRRYTGWGRLSRKLINGIRDKQSGKTILDFLKSDGFANRNFMQLIHDD
SLTFKEDIQKAQVSGQGDSLHEHIANLAGSPAIKKGILQTVKVVDELVKV
MGRHKPENIVIEMARENQTTQKGQKNSRERMKRIEEGIKELGSQILKEHP
VENTQLQNEKLYLYYLQNGRDMYVDQELDINRLSDYDVDHIVPQSFLKDD
SIDNKVLTRSDKNRGKSDNVPSEEVVKKMKNYWRQLLNAKLITQRKFDNL
TKAERGGLSELDKAGFIKRQLVETRQITKHVAQILDSRMNTKYDENDKLI
REVKVITLKSKLVSDFRKDFQFYKVREINNYHHAHDAYLNAVVGTALIKK
YPKLESEEVYGDYKVYDVRKMIAKSEQEIGKATAKYFFYSNIMNFFKTEI
TLANGEIRKRPLIETNGETGEIVWDKGRDFATVRKVLSMPQVNIVKKTEV
QTGGFSKESILPKRNSDKLIARKKDWDPKKYGGFDSPTVAYSVLVVAKVE
KGKSKKLKSVKELLGITIMERSSFEKNPIDFLEAKGYKEVKKDLIIKLPK
YSLEELENGRKRMLASAGELQKGNELALPSKYVNELYLASHYEKLKGSPE
DNEQKQLEVEQHKHYLDEIIEQISEESKRVILADANLDKVLSAYNKHRMN
HRVEITEGILADECAALLCYFFRMPRQVFNAQKKAQSSTDGSSGSETPGT
SESATPESSGSEVEESHEYWMRHALTLAKRARDEREVPVGAVLVLNNRVI
GEGWNRAIGLHDPTAHAEIMALRQGGLVMQNYRLIDATLYVTEEPCVMCA
GAMIHSRIGRVVFGVRNAKTGAAGSLMDVLHYPGDKPIREQAENIIHLFT
LTNLGAPAAFKYFDTTIDRKRYTSTKEVLDATLIHQSITGLYETRIDLSQ
LGGD
124 Cas9 delta 792-872 TadAins
MDKKYSIGLAIGTNSVGWAVITDEYKVPSKKFKVLGNTDRHSIKKNLIGA
LLEDSGETAEATRLKRTARRRYTRRKNRICYLQEIESNEMAKVDDSFFHR
LEESFLVEEDKKHERHPIFGNIVDEVAYHEKYPTIYHLRKKLVDSTDKAD
LRLIYLALAHMIKFRGHFLIEGDLNPDNSDVDKLFIQLVQTYNQLFEENP
INASGVDAKAILSARLSKSRRLENLIAQLPGEKKNGLFGNLIALSLGLTP
NFKSNFDLAEDAKLQLSKDTYDDDLDNLLAQIGDQYADLFLAAKNLSDAI
LLSDILRVNTEITKAPLSASMIKRYDEHHQDLTLLKALVRQQLPEKYKEI
FFDQSKNGYAGYIDGGASQEEFYKFIKPILEKMDGTEELLVKLNREDLLR
KQRTFDNGSIPHQIHLGELHAILRRQEDFYPFLKDNREKIEKILTFRIPY
YVGPLARGNSRFAWMTRKSEETITPWNFEEVVDKGASAQSFIERMTNFDK
NLPNEKVLPKHSLLYEYFTVYNELTKVKYVTEGMRKPAFLSGEQKKAIVD
LLFKTNRKVTVKQLKEDYFKKIECFDSVEISGVEDRFNASLGTYHDLLKI
IKDKDFLDNEENEDILEDIVLTLTLFEDREMIEERLKTYAHLFDDKVMKQ
LKRRRYTGWGRLSRKLINGIRDKQSGKTILDFLKSDGFANRNFMQLIHDD
SLTFKEDIQKAQVSGQGDSLHEHIANLAGSPAIKKGILQTVKVVDELVKV
MGRHKPENIVIEMARENQTTQKGQKNSRERMKRIEEGIKELGSEVEFSHE
YWMRHALTLAKRARDEREVPVGAVLVLNNRVIGEGWNRAIGLHDPTAHAE
IMALRQGGLVMQNYRLIDATLYVTFEPCVMCAGAMIHSRIGRVVFGVRNA
KTGAAGSLMDVLHYPGMNHRVEITEGILADECAALLCYFFRMPRQVFNAQ
KKAQSSTDEEVVKKMKNYWRQLLNAKLITQRKFDNLTKAERGGLSELDKA
GFIKRQLVETRQITKHVAQILDSRMNTKYDENDKLIREVKVITLKSKLVS
DFRKDFQFYKVREINNYHHAHDAYLNAVVGTALIKKYPKLESEEVYGDYK
VYDVRKMIAKSEQEIGKATAKYFFYSNIMNFFKTEITLANGEIRKRPLIE
TNGETGEIVWDKGRDFATVRKVLSMPQVNIVKKTEVQTGGFSKESILPKR
NSDKLIARKKDWDPKKYGGFDSPTVAYSVLVVAKVEKGKSKKLKSVKELL
GITIMERSSFEKNPIDFLEAKGYKEVKKDLIIKLPKYSLEELENGRKRML
ASAGELQKGNELALPSKYVNFLYLASHYEKLKGSPEDNEQKQLFVEQHKH
YLDEIIEQISEFSKRVILADANLDKVLSAYNKHRDKPIREQAENIIHLET
LTNLGAPAAFKYFDTTIDRKRYTSTKEVLDATLIHQSITGLYETRIDLSQ
LGGD
125 Cas9 delta 792-906 TadAins
MDKKYSIGLAIGTNSVGWAVITDEYKVPSKKFKVLGNTDRHSIKKNLIGA
LLFDSGETAEATRLKRTARRRYTRRKNRICYLQEIFSNEMAKVDDSFFHR
LEESFLVEEDKKHERHPIFGNIVDEVAYHEKYPTIYHLRKKLVDSTDKAD
LRLIYLALAHMIKFRGHFLIEGDLNPDNSDVDKLFIQLVQTYNQLFEENP
INASGVDAKAILSARLSKSRRLENLIAQLPGEKKNGLFGNLIALSLGLTP
NFKSNFDLAEDAKLQLSKDTYDDDLDNLLAQIGDQYADLFLAAKNLSDAI
LLSDILRVNTEITKAPLSASMIKRYDEHHQDLTLLKALVRQQLPEKYKEI
FFDQSKNGYAGYIDGGASQEEFYKFIKPILEKMDGTEELLVKLNREDLLR
KQRTFDNGSIPHQIHLGELHAILRRQEDFYPFLKDNREKIEKILTFRIPY
YVGPLARGNSRFAWMTRKSEETITPWNFEEVVDKGASAQSFIERMTNFDK
NLPNEKVLPKHSLLYEYFTVYNELTKVKYVTEGMRKPAFLSGEQKKAIVD
LLFKTNRKVTVKQLKEDYFKKIECFDSVEISGVEDRFNASLGTYHDLLKI
IKDKDFLDNEENEDILEDIVLTLTLFEDREMIEERLKTYAHLFDDKVMKQ
LKRRRYTGWGRLSRKLINGIRDKQSGKTILDFLKSDGFANRNFMQLIHDD
SLTFKEDIQKAQVSGQGDSLHEHIANLAGSPAIKKGILQTVKVVDELVKV
MGRHKPENIVIEMARENQTTQKGQKNSRERMKRIEEGIKELGSEVEFSHE
YWMRHALTLAKRARDEREVPVGAVLVLNNRVIGEGWNRAIGLHDPTAHAE
IMALRQGGLVMQNYRLIDATLYVTFEPCVMCAGAMIHSRIGRVVFGVRNA
KTGAAGSLMDVLHYPGMNHRVEITEGILADECAALLCYFFRMPRQVFNAQ
KKAQSSTDGLSELDKAGFIKRQLVETRQITKHVAQILDSRMNTKYDENDK
LIREVKVITLKSKLVSDFRKDFQFYKVREINNYHHAHDAYLNAVVGTALI
KKYPKLESEFVYGDYKVYDVRKMIAKSEQEIGKATAKYFFYSNIMNFFKT
EITLANGEIRKRPLIETNGETGEIVWDKGRDFATVRKVLSMPQVNIVKKT
EVQTGGFSKESILPKRNSDKLIARKKDWDPKKYGGFDSPTVAYSVLVVAK
VEKGKSKKLKSVKELLGITIMERSSFEKNPIDFLEAKGYKEVKKDLIIKL
PKYSLFELENGRKRMLASAGELQKGNELALPSKYVNFLYLASHYEKLKGS
PEDNEQKQLEVEQHKHYLDEIIEQISEESKRVILADANLDKVLSAYNKHR
DKPIREQAENIIHLFTLTNLGAPAAFKYFDTTIDRKRYTSTKEVLDATLI
HQSITGLYETRIDLSQLGGD
126 TadA CP65ins 1003
MDKKYSIGLAIGTNSVGWAVITDEYKVPSKKFKVLGNTDRHSIKKNLIGA
LLFDSGETAEATRLKRTARRRYTRRKNRICYLQEIFSNEMAKVDDSFFHR
LEESFLVEEDKKHERHPIFGNIVDEVAYHEKYPTIYHLRKKLVDSTDKAD
LRLIYLALAHMIKFRGHFLIEGDLNPDNSDVDKLFIQLVQTYNQLFEENP
INASGVDAKAILSARLSKSRRLENLIAQLPGEKKNGLFGNLIALSLGLTP
NFKSNFDLAEDAKLQLSKDTYDDDLDNLLAQIGDQYADLFLAAKNLSDAI
LLSDILRVNTEITKAPLSASMIKRYDEHHQDLTLLKALVRQQLPEKYKEI
FFDQSKNGYAGYIDGGASQEEFYKFIKPILEKMDGTEELLVKLNREDLLR
KQRTFDNGSIPHQIHLGELHAILRRQEDFYPFLKDNREKIEKILTFRIPY
YVGPLARGNSRFAWMTRKSEETITPWNFEEVVDKGASAQSFIERMTNFDK
NLPNEKVLPKHSLLYEYFTVYNELTKVKYVTEGMRKPAFLSGEQKKAIVD
LLFKTNRKVTVKQLKEDYFKKIECFDSVEISGVEDRFNASLGTYHDLLKI
IKDKDFLDNEENEDILEDIVLTLTLFEDREMIEERLKTYAHLFDDKVMKQ
LKRRRYTGWGRLSRKLINGIRDKQSGKTILDFLKSDGFANRNFMQLIHDD
SLTFKEDIQKAQVSGQGDSLHEHIANLAGSPAIKKGILQTVKVVDELVKV
MGRHKPENIVIEMARENQTTQKGQKNSRERMKRIEEGIKELGSQILKEHP
VENTQLQNEKLYLYYLQNGRDMYVDQELDINRLSDYDVDHIVPQSFLKDD
SIDNKVLTRSDKNRGKSDNVPSEEVVKKMKNYWRQLLNAKLITQRKFDNL
TKAERGGLSELDKAGFIKRQLVETRQITKHVAQILDSRMNTKYDENDKLI
REVKVITLKSKLVSDFRKDFQFYKVREINNYHHAHDAYLNAVVGTALIKK
YPKTAHAEIMALRQGGLVMQNYRLIDATLYVTFEPCVMCAGAMIHSRIGR
VVFGVRNAKTGAAGSLMDVLHYPGMNHRVEITEGILADEGAALLCYFFRM
PRQVFNAQKKAQSSTDGSSGSETPGTSESATPESSGSEVEFSHEYWMRHA
LTLAKRARDEREVPVGAVLVLNNRVIGEGWNRAIGLHDPLESEFVYGDYK
VYDVRKMIAKSEQEIGKATAKYFFYSNIMNFFKTEITLANGEIRKRPLIE
TNGETGEIVWDKGRDFATVRKVLSMPQVNIVKKTEVQTGGFSKESILPKR
NSDKLIARKKDWDPKKYGGFDSPTVAYSVLVVAKVEKGKSKKLKSVKELL
GITIMERSSFEKNPIDFLEAKGYKEVKKDLIIKLPKYSLFELENGRKRML
ASAGELQKGNELALPSKYVNFLYLASHYEKLKGSPEDNEQKQLFVEQHKH
YLDEIIEQISEFSKRVILADANLDKVLSAYNKHRDKPIREQAENIIHLET
LTNLGAPAAFKYFDTTIDRKRYTSTKEVLDATLIHQSITGLYETRIDLSQ
LGGD
127 TadA CP65ins 1016
MDKKYSIGLAIGTNSVGWAVITDEYKVPSKKFKVLGNTDRHSIKKNLIGA
LLFDSGETAEATRLKRTARRRYTRRKNRICYLQEIFSNEMAKVDDSFFHR
LEESFLVEEDKKHERHPIFGNIVDEVAYHEKYPTIYHLRKKLVDSTDKAD
LRLIYLALAHMIKFRGHFLIEGDLNPDNSDVDKLFIQLVQTYNQLFEENP
INASGVDAKAILSARLSKSRRLENLIAQLPGEKKNGLFGNLIALSLGLTP
NFKSNFDLAEDAKLQLSKDTYDDDLDNLLAQIGDQYADLFLAAKNLSDAI
LLSDILRVNTEITKAPLSASMIKRYDEHHQDLTLLKALVRQQLPEKYKEI
FFDQSKNGYAGYIDGGASQEEFYKFIKPILEKMDGTEELLVKLNREDLLR
KQRTFDNGSIPHQIHLGELHAILRRQEDFYPFLKDNREKIEKILTFRIPY
YVGPLARGNSRFAWMTRKSEETITPWNFEEVVDKGASAQSFIERMTNFDK
NLPNEKVLPKHSLLYEYFTVYNELTKVKYVTEGMRKPAFLSGEQKKAIVD
LLFKTNRKVTVKQLKEDYFKKIECFDSVEISGVEDRFNASLGTYHDLLKI
IKDKDFLDNEENEDILEDIVLTLTLFEDREMIEERLKTYAHLFDDKVMKQ
LKRRRYTGWGRLSRKLINGIRDKQSGKTILDFLKSDGFANRNFMQLIHDD
SLTFKEDIQKAQVSGQGDSLHEHIANLAGSPAIKKGILQTVKVVDELVKV
MGRHKPENIVIEMARENQTTQKGQKNSRERMKRIEEGIKELGSQILKEHP
VENTQLQNEKLYLYYLQNGRDMYVDQELDINRLSDYDVDHIVPQSFLKDD
SIDNKVLTRSDKNRGKSDNVPSEEVVKKMKNYWRQLLNAKLITQRKFDNL
TKAERGGLSELDKAGFIKRQLVETRQITKHVAQILDSRMNTKYDENDKLI
REVKVITLKSKLVSDFRKDFQFYKVREINNYHHAHDAYLNAVVGTALIKK
YPKLESEFVYGDYKVTAHAEIMALRQGGLVMQNYRLIDATLYVTEEPCVM
CAGAMIHSRIGRVVFGVRNAKTGAAGSLMDVLHYPGMNHRVEITEGILAD
ECAALLCYFFRMPRQVFNAQKKAQSSTDGSSGSETPGTSESATPESSGSE
VEFSHEYWMRHALTLAKRARDEREVPVGAVLVLNNRVIGEGWNRAIGLHD
PYDVRKMIAKSEQEIGKATAKYFFYSNIMNFFKTEITLANGEIRKRPLIE
TNGETGEIVWDKGRDFATVRKVLSMPQVNIVKKTEVQTGGFSKESILPKR
NSDKLIARKKDWDPKKYGGFDSPTVAYSVLVVAKVEKGKSKKLKSVKELL
GITIMERSSFEKNPIDFLEAKGYKEVKKDLIIKLPKYSLFELENGRKRML
ASAGELQKGNELALPSKYVNFLYLASHYEKLKGSPEDNEQKQLFVEQHKH
YLDEIIEQISEFSKRVILADANLDKVLSAYNKHRDKPIREQAENIIHLET
LTNLGAPAAFKYFDTTIDRKRYTSTKEVLDATLIHQSITGLYETRIDLSQ
LGGD
128 TadA CP65ins 1022
MDKKYSIGLAIGTNSVGWAVITDEYKVPSKKFKVLGNTDRHSIKKNLIGA
LLFDSGETAEATRLKRTARRRYTRRKNRICYLQEIFSNEMAKVDDSFFHR
LEESFLVEEDKKHERHPIFGNIVDEVAYHEKYPTIYHLRKKLVDSTDKAD
LRLIYLALAHMIKFRGHFLIEGDLNPDNSDVDKLFIQLVQTYNQLFEENP
INASGVDAKAILSARLSKSRRLENLIAQLPGEKKNGLFGNLIALSLGLTP
NFKSNFDLAEDAKLQLSKDTYDDDLDNLLAQIGDQYADLFLAAKNLSDAI
LLSDILRVNTEITKAPLSASMIKRYDEHHQDLTLLKALVRQQLPEKYKEI
FFDQSKNGYAGYIDGGASQEEFYKFIKPILEKMDGTEELLVKLNREDLLR
KQRTFDNGSIPHQIHLGELHAILRRQEDFYPFLKDNREKIEKILTFRIPY
YVGPLARGNSRFAWMTRKSEETITPWNFEEVVDKGASAQSFIERMTNFDK
NLPNEKVLPKHSLLYEYFTVYNELTKVKYVTEGMRKPAFLSGEQKKAIVD
LLFKTNRKVTVKQLKEDYFKKIECFDSVEISGVEDRFNASLGTYHDLLKI
IKDKDFLDNEENEDILEDIVLTLTLFEDREMIEERLKTYAHLFDDKVMKQ
LKRRRYTGWGRLSRKLINGIRDKQSGKTILDFLKSDGFANRNFMQLIHDD
SLTFKEDIQKAQVSGQGDSLHEHIANLAGSPAIKKGILQTVKVVDELVKV
MGRHKPENIVIEMARENQTTQKGQKNSRERMKRIEEGIKELGSQILKEHP
VENTQLQNEKLYLYYLQNGRDMYVDQELDINRLSDYDVDHIVPQSFLKDD
SIDNKVLTRSDKNRGKSDNVPSEEVVKKMKNYWRQLLNAKLITQRKFDNL
TKAERGGLSELDKAGFIKRQLVETRQITKHVAQILDSRMNTKYDENDKLI
REVKVITLKSKLVSDFRKDFQFYKVREINNYHHAHDAYLNAVVGTALIKK
YPKLESEFVYGDYKVYDVRKMITAHAEIMALRQGGLVMQNYRLIDATLYV
TFEPCVMCAGAMIHSRIGRVVFGVRNAKTGAAGSLMDVLHYPGMNHRVEI
TEGILADECAALLCYFFRMPRQVFNAQKKAQSSTDGSSGSETPGTSESAT
PESSGSEVEESHEYWMRHALTLAKRARDEREVPVGAVLVLNNRVIGEGWN
RAIGLHDPAKSEQEIGKATAKYFFYSNIMNFFKTEITLANGEIRKRPLIE
TNGETGEIVWDKGRDFATVRKVLSMPQVNIVKKTEVQTGGFSKESILPKR
NSDKLIARKKDWDPKKYGGFDSPTVAYSVLVVAKVEKGKSKKLKSVKELL
GITIMERSSFEKNPIDFLEAKGYKEVKKDLIIKLPKYSLEELENGRKRML
ASAGELQKGNELALPSKYVNFLYLASHYEKLKGSPEDNEQKQLFVEQHKH
YLDEIIEQISEFSKRVILADANLDKVLSAYNKHRDKPIREQAENIIHLET
LTNLGAPAAFKYFDTTIDRKRYTSTKEVLDATLIHQSITGLYETRIDLSQ
LGGD
129 TadA CP65ins 1029
MDKKYSIGLAIGTNSVGWAVITDEYKVPSKKFKVLGNTDRHSIKKNLIGA
LLFDSGETAEATRLKRTARRRYTRRKNRICYLQEIFSNEMAKVDDSFFHR
LEESFLVEEDKKHERHPIFGNIVDEVAYHEKYPTIYHLRKKLVDSTDKAD
LRLIYLALAHMIKFRGHFLIEGDLNPDNSDVDKLFIQLVQTYNQLFEENP
INASGVDAKAILSARLSKSRRLENLIAQLPGEKKNGLFGNLIALSLGLTP
NFKSNFDLAEDAKLQLSKDTYDDDLDNLLAQIGDQYADLFLAAKNLSDAI
LLSDILRVNTEITKAPLSASMIKRYDEHHQDLTLLKALVRQQLPEKYKEI
FFDQSKNGYAGYIDGGASQEEFYKFIKPILEKMDGTEELLVKLNREDLLR
KQRTFDNGSIPHQIHLGELHAILRRQEDFYPFLKDNREKIEKILTFRIPY
YVGPLARGNSRFAWMTRKSEETITPWNFEEVVDKGASAQSFIERMTNFDK
NLPNEKVLPKHSLLYEYFTVYNELTKVKYVTEGMRKPAFLSGEQKKAIVD
LLFKTNRKVTVKQLKEDYFKKIECFDSVEISGVEDRFNASLGTYHDLLKI
IKDKDFLDNEENEDILEDIVLTLTLFEDREMIEERLKTYAHLFDDKVMKQ
LKRRRYTGWGRLSRKLINGIRDKQSGKTILDFLKSDGFANRNFMQLIHDD
SLTFKEDIQKAQVSGQGDSLHEHIANLAGSPAIKKGILQTVKVVDELVKV
MGRHKPENIVIEMARENQTTQKGQKNSRERMKRIEEGIKELGSQILKEHP
VENTQLQNEKLYLYYLQNGRDMYVDQELDINRLSDYDVDHIVPQSFLKDD
SIDNKVLTRSDKNRGKSDNVPSEEVVKKMKNYWRQLLNAKLITQRKFDNL
TKAERGGLSELDKAGFIKRQLVETRQITKHVAQILDSRMNTKYDENDKLI
REVKVITLKSKLVSDFRKDFQFYKVREINNYHHAHDAYLNAVVGTALIKK
YPKLESEFVYGDYKVYDVRKMIAKSEQEITAHAEIMALRQGGLVMQNYRL
IDATLYVTFEPCVMCAGAMIHSRIGRVVFGVRNAKTGAAGSLMDVLHYPG
MNHRVEITEGILADECAALLCYFFRMPRQVFNAQKKAQSSTDGSSGSETP
GTSESATPESSGSEVEESHEYWMRHALTLAKRARDEREVPVGAVLVLNNR
VIGEGWNRAIGLHDPGKATAKYFFYSNIMNFFKTEITLANGEIRKRPLIE
TNGETGEIVWDKGRDFATVRKVLSMPQVNIVKKTEVQTGGFSKESILPKR
NSDKLIARKKDWDPKKYGGFDSPTVAYSVLVVAKVEKGKSKKLKSVKELL
GITIMERSSFEKNPIDFLEAKGYKEVKKDLIIKLPKYSLFELENGRKRML
ASAGELQKGNELALPSKYVNFLYLASHYEKLKGSPEDNEQKQLFVEQHKH
YLDEIIEQISEFSKRVILADANLDKVLSAYNKHRDKPIREQAENIIHLET
LTNLGAPAAFKYFDTTIDRKRYTSTKEVLDATLIHQSITGLYETRIDLSQ
LGGD
130 TadA CP65ins 1041
MDKKYSIGLAIGTNSVGWAVITDEYKVPSKKFKVLGNTDRHSIKKNLIGA
LLFDSGETAEATRLKRTARRRYTRRKNRICYLQEIFSNEMAKVDDSFFHR
LEESFLVEEDKKHERHPIFGNIVDEVAYHEKYPTIYHLRKKLVDSTDKAD
LRLIYLALAHMIKFRGHFLIEGDLNPDNSDVDKLFIQLVQTYNQLFEENP
INASGVDAKAILSARLSKSRRLENLIAQLPGEKKNGLFGNLIALSLGLTP
NFKSNFDLAEDAKLQLSKDTYDDDLDNLLAQIGDQYADLFLAAKNLSDAI
LLSDILRVNTEITKAPLSASMIKRYDEHHQDLTLLKALVRQQLPEKYKEI
FFDQSKNGYAGYIDGGASQEEFYKFIKPILEKMDGTEELLVKLNREDLLR
KQRTFDNGSIPHQIHLGELHAILRRQEDFYPFLKDNREKIEKILTFRIPY
YVGPLARGNSRFAWMTRKSEETITPWNFEEVVDKGASAQSFIERMTNFDK
NLPNEKVLPKHSLLYEYFTVYNELTKVKYVTEGMRKPAFLSGEQKKAIVD
LLFKTNRKVTVKQLKEDYFKKIECFDSVEISGVEDRFNASLGTYHDLLKI
IKDKDFLDNEENEDILEDIVLTLTLFEDREMIEERLKTYAHLFDDKVMKQ
LKRRRYTGWGRLSRKLINGIRDKQSGKTILDFLKSDGFANRNFMQLIHDD
SLTFKEDIQKAQVSGQGDSLHEHIANLAGSPAIKKGILQTVKVVDELVKV
MGRHKPENIVIEMARENQTTQKGQKNSRERMKRIEEGIKELGSQILKEHP
VENTQLQNEKLYLYYLQNGRDMYVDQELDINRLSDYDVDHIVPQSFLKDD
SIDNKVLTRSDKNRGKSDNVPSEEVVKKMKNYWRQLLNAKLITQRKFDNL
TKAERGGLSELDKAGFIKRQLVETRQITKHVAQILDSRMNTKYDENDKLI
REVKVITLKSKLVSDFRKDFQFYKVREINNYHHAHDAYLNAVVGTALIKK
YPKLESEFVYGDYKVYDVRKMIAKSEQEIGKATAKYFFYSTAHAEIMALR
QGGLVMQNYRLIDATLYVTFEPCVMCAGAMIHSRIGRVVFGVRNAKTGAA
GSLMDVLHYPGMNHRVEITEGILADECAALLCYFFRMPRQVFNAQKKAQS
STDGSSGSETPGTSESATPESSGSEVEFSHEYWMRHALTLAKRARDEREV
PVGAVLVLNNRVIGEGWNRAIGLHDPNIMNFFKTEITLANGEIRKRPLIE
TNGETGEIVWDKGRDFATVRKVLSMPQVNIVKKTEVQTGGFSKESILPKR
NSDKLIARKKDWDPKKYGGFDSPTVAYSVLVVAKVEKGKSKKLKSVKELL
GITIMERSSFEKNPIDFLEAKGYKEVKKDLIIKLPKYSLFELENGRKRML
ASAGELQKGNELALPSKYVNFLYLASHYEKLKGSPEDNEQKQLFVEQHKH
YLDEIIEQISEFSKRVILADANLDKVLSAYNKHRDKPIREQAENIIHLET
LTNLGAPAAFKYFDTTIDRKRYTSTKEVLDATLIHQSITGLYETRIDLSQ
LGGD
131 TadA CP65ins 1054
MDKKYSIGLAIGTNSVGWAVITDEYKVPSKKFKVLGNTDRHSIKKNLIGA
LLFDSGETAEATRLKRTARRRYTRRKNRICYLQEIFSNEMAKVDDSFFHR
LEESFLVEEDKKHERHPIFGNIVDEVAYHEKYPTIYHLRKKLVDSTDKAD
LRLIYLALAHMIKFRGHFLIEGDLNPDNSDVDKLFIQLVQTYNQLFEENP
INASGVDAKAILSARLSKSRRLENLIAQLPGEKKNGLFGNLIALSLGLTP
NFKSNFDLAEDAKLQLSKDTYDDDLDNLLAQIGDQYADLFLAAKNLSDAI
LLSDILRVNTEITKAPLSASMIKRYDEHHQDLTLLKALVRQQLPEKYKEI
FFDQSKNGYAGYIDGGASQEEFYKFIKPILEKMDGTEELLVKLNREDLLR
KQRTFDNGSIPHQIHLGELHAILRRQEDFYPFLKDNREKIEKILTFRIPY
YVGPLARGNSRFAWMTRKSEETITPWNFEEVVDKGASAQSFIERMTNFDK
NLPNEKVLPKHSLLYEYFTVYNELTKVKYVTEGMRKPAFLSGEQKKAIVD
LLFKTNRKVTVKQLKEDYFKKIECFDSVEISGVEDRFNASLGTYHDLLKI
IKDKDFLDNEENEDILEDIVLTLTLFEDREMIEERLKTYAHLFDDKVMKQ
LKRRRYTGWGRLSRKLINGIRDKQSGKTILDFLKSDGFANRNFMQLIHDD
SLTFKEDIQKAQVSGQGDSLHEHIANLAGSPAIKKGILQTVKVVDELVKV
MGRHKPENIVIEMARENQTTQKGQKNSRERMKRIEEGIKELGSQILKEHP
VENTQLQNEKLYLYYLQNGRDMYVDQELDINRLSDYDVDHIVPQSFLKDD
SIDNKVLTRSDKNRGKSDNVPSEEVVKKMKNYWRQLLNAKLITQRKFDNL
TKAERGGLSELDKAGFIKRQLVETRQITKHVAQILDSRMNTKYDENDKLI
REVKVITLKSKLVSDFRKDFQFYKVREINNYHHAHDAYLNAVVGTALIKK
YPKLESEFVYGDYKVYDVRKMIAKSEQEIGKATAKYFFYSNIMNFFKTEI
TLANTAHAEIMALRQGGLVMQNYRLIDATLYVTFEPCVMCAGAMIHSRIG
RVVFGVRNAKTGAAGSLMDVLHYPGMNHRVEITEGILADEGAALLCYFFR
MPRQVFNAQKKAQSSTDGSSGSETPGTSESATPESSGSEVEFSHEYWMRH
ALTLAKRARDEREVPVGAVLVLNNRVIGEGWNRAIGLHDPGEIRKRPLIE
TNGETGEIVWDKGRDFATVRKVLSMPQVNIVKKTEVQTGGFSKESILPKR
NSDKLIARKKDWDPKKYGGFDSPTVAYSVLVVAKVEKGKSKKLKSVKELL
GITIMERSSFEKNPIDFLEAKGYKEVKKDLIIKLPKYSLFELENGRKRML
ASAGELQKGNELALPSKYVNFLYLASHYEKLKGSPEDNEQKQLFVEQHKH
YLDEIIEQISEFSKRVILADANLDKVLSAYNKHRDKPIREQAENIIHLET
LTNLGAPAAFKYFDTTIDRKRYTSTKEVLDATLIHQSITGLYETRIDLSQ
LGGD
132 TadA CP65ins 1246
MDKKYSIGLAIGTNSVGWAVITDEYKVPSKKFKVLGNTDRHSIKKNLIGA
LLFDSGETAEATRLKRTARRRYTRRKNRICYLQEIFSNEMAKVDDSFFHR
LEESFLVEEDKKHERHPIFGNIVDEVAYHEKYPTIYHLRKKLVDSTDKAD
LRLIYLALAHMIKFRGHFLIEGDLNPDNSDVDKLFIQLVQTYNQLFEENP
INASGVDAKAILSARLSKSRRLENLIAQLPGEKKNGLFGNLIALSLGLTP
NFKSNFDLAEDAKLQLSKDTYDDDLDNLLAQIGDQYADLFLAAKNLSDAI
LLSDILRVNTEITKAPLSASMIKRYDEHHQDLTLLKALVRQQLPEKYKEI
FFDQSKNGYAGYIDGGASQEEFYKFIKPILEKMDGTEELLVKLNREDLLR
KQRTFDNGSIPHQIHLGELHAILRRQEDFYPFLKDNREKIEKILTFRIPY
YVGPLARGNSRFAWMTRKSEETITPWNFEEVVDKGASAQSFIERMTNFDK
NLPNEKVLPKHSLLYEYFTVYNELTKVKYVTEGMRKPAFLSGEQKKAIVD
LLFKTNRKVTVKQLKEDYFKKIECFDSVEISGVEDRFNASLGTYHDLLKI
IKDKDFLDNEENEDILEDIVLTLTLFEDREMIEERLKTYAHLFDDKVMKQ
LKRRRYTGWGRLSRKLINGIRDKQSGKTILDFLKSDGFANRNFMQLIHDD
SLTFKEDIQKAQVSGQGDSLHEHIANLAGSPAIKKGILQTVKVVDELVKV
MGRHKPENIVIEMARENQTTQKGQKNSRERMKRIEEGIKELGSQILKEHP
VENTQLQNEKLYLYYLQNGRDMYVDQELDINRLSDYDVDHIVPQSFLKDD
SIDNKVLTRSDKNRGKSDNVPSEEVVKKMKNYWRQLLNAKLITQRKFDNL
TKAERGGLSELDKAGFIKRQLVETRQITKHVAQILDSRMNTKYDENDKLI
REVKVITLKSKLVSDFRKDFQFYKVREINNYHHAHDAYLNAVVGTALIKK
YPKLESEFVYGDYKVYDVRKMIAKSEQEIGKATAKYFFYSNIMNFFKTEI
TLANGEIRKRPLIETNGETGEIVWDKGRDFATVRKVLSMPQVNIVKKTEV
QTGGFSKESILPKRNSDKLIARKKDWDPKKYGGFDSPTVAYSVLVVAKVE
KGKSKKLKSVKELLGITIMERSSFEKNPIDFLEAKGYKEVKKDLIIKLPK
YSLFELENGRKRMLASAGELQKGNELALPSKYVNFLYLASHYEKLKGTAH
AEIMALRQGGLVMQNYRLIDATLYVTFEPCVMCAGAMIHSRIGRVVFGVR
NAKTGAAGSLMDVLHYPGMNHRVEITEGILADECAALLCYFFRMPRQVFN
AQKKAQSSTDGSSGSETPGTSESATPESSGSEVEFSHEYWMRHALTLAKR
ARDEREVPVGAVLVLNNRVIGEGWNRAIGLHDPSPEDNEQKQLFVEQHKH
YLDEIIEQISEFSKRVILADANLDKVLSAYNKHRDKPIREQAENIIHLFT
LTNLGAPAAFKYFDTTIDRKRYTSTKEVLDATLIHQSITGLYETRIDLSQ
LGGD

[0418] In some embodiments, adenosine deaminase base editors were generated to insert TadA or variants thereof into the Cas9 polypeptide at the identified positions.

[0419] Exemplary, yet nonlimiting, fusion proteins are described in International PCT Application Nos. PCT/US2020/016285 and U.S. Provisional Application Nos. 62/852,228 and 62/852,224, the contents of which are incorporated by reference herein in their entireties.

### Nucleobase Editing Domain

[0420] Described herein are base editors comprising a fusion protein that includes a polynucleotide programmable nucleotide binding domain and a nucleobase editing domain (e.g., deaminase domain). The base editor can be programmed to edit one or more bases in a target polynucleotide sequence by interacting with a guide polynucleotide capable of recognizing the target sequence. Once the target sequence has been recognized, the base editor is anchored on the polynucleotide where editing is to occur and the deaminase domain components of the base editor can then edit a target base.

[0421] In some embodiments, the nucleobase editing domain includes a deaminase domain. In some embodiments, a deaminase domain can be an adenine deaminase or an adenosine deaminase. In some embodiments, the terms “adenine deaminase” and “adenosine deaminase” can be used interchangeably. Details of nucleobase editing proteins are described in International PCT Application Nos. PCT/2017/045381 (WO 2018/027078) and PCT/US2016/058344 (WO 2017/070632), each of which is incorporated herein by reference for its entirety. Also see Komor, A. C., et al., “Programmable editing of a target base in genomic DNA without double-stranded DNA cleavage” Nature 533, 420-424 (2016); Gaudelli, N. M., et al., “Programmable base editing of A⋅T to G⋅C in genomic DNA without DNA cleavage” Nature 551, 464-471 (2017); and Komor, A. C., et al., “Improved base excision repair inhibition and bacteriophage Mu Gam protein yields C:G-to-T:A base editors with higher efficiency and product purity” Science Advances 3:eaao4774 (2017), the entire contents of which are hereby incorporated by reference.

### A to G Editing

[0422] In some embodiments, a base editor described herein can comprise a deaminase domain which includes an adenosine deaminase. Such an adenosine deaminase domain of a base editor can facilitate the editing of an adenine (A) nucleobase to a guanine (G) nucleobase by deaminating the A to form inosine (I), which exhibits base pairing properties of G. Adenosine deaminas is capable of deaminating (i.e., removing an amine group) adenine of a deoxyadenosine residue in deoxyribonucleic acid (DNA).

[0423] In some embodiments, the nucleobase editors provided herein can be made by fusing together one or more protein domains, thereby generating a fusion protein. In certain embodiments, the fusion proteins provided herein comprise one or more features that improve the base editing activity (e.g., efficiency, selectivity, and specificity) of the fusion proteins. For example, the fusion proteins provided herein can comprise a Cas9 domain that has reduced nuclease activity. In some embodiments, the fusion proteins provided herein can have a Cas9 domain that does not have nuclease activity (dCas9), or a Cas9 domain that cuts one strand of a duplexed DNA molecule, referred to as a Cas9 nickase (nCas9). Without wishing to be bound by any particular theory, the presence of the catalytic residue (e.g., H840) maintains the activity of the Cas9 to cleave the non-edited (e.g., non-deaminated) strand containing a T opposite the targeted A. Mutation of the catalytic residue (e.g., D10 to A10) of Cas9 prevents cleavage of the edited strand containing the targeted A residue. Such Cas9 variants are able to generate a single-strand DNA break (nick) at a specific location based on the gRNA-defined target sequence, leading to repair of the non-edited strand, ultimately resulting in a T to C change on the non-edited strand. In some embodiments, an A-to-G base editor further comprises an inhibitor of inosine base excision repair, for example, a uracil glycosylase inhibitor (UGI) domain or a catalytically inactive inosine specific nuclease. Without wishing to be bound by any particular theory, the UGI domain or catalytically inactive inosine specific nuclease can inhibit or prevent base excision repair of a deaminated adenosine residue (e.g., inosine), which can improve the activity or efficiency of the base editor.

[0424] A base editor comprising an adenosine deaminase can act on any polynucleotide, including DNA, RNA and DNA-RNA hybrids. In certain embodiments, a base editor comprising an adenosine deaminase can deaminate a target A of a polynucleotide comprising RNA. For example, the base editor can comprise an adenosine deaminase domain capable of deaminating a target A of an RNA polynucleotide and/or a DNA-RNA hybrid polynucleotide. In an embodiment, an adenosine deaminase incorporated into a base editor comprises all or a portion of adenosine deaminase acting on RNA (ADAR, e.g., ADAR1 or ADAR2). In another embodiment, an adenosine deaminase incorporated into a base editor comprises all or a portion of adenosine deaminase acting on tRNA (ADAT). A base editor comprising an adenosine deaminase domain can also be capable of deaminating an A nucleobase of a DNA polynucleotide. In an embodiment an adenosine deaminase domain of a base editor comprises all or a portion of an ADAT comprising one or more mutations which permit the ADAT to deaminate a target A in DNA. For example, the base editor can comprise all or a portion of an ADAT from Escherichia coli (EcTadA) comprising one or more of the following mutations: D108N, A106V, D147Y, E155V, L84F, H123Y, I156F, or a corresponding mutation in another adenosine deaminase.

[0425] The adenosine deaminase can be derived from any suitable organism (e.g., E. coli). In some embodiments, the adenosine deaminase is from a prokaryote. In some embodiments, the adenosine deaminase is from a bacterium. In some embodiments, the adenosine deaminase is from Escherichia coli, Staphylococcus aureus, Salmonella typhi, Shewanella putrefaciens, Haemophilus influenzae, Caulobacter crescentus, or Bacillus subtilis. In some embodiments, the adenosine deaminase is from E. coli. In some embodiments, the adenine deaminase is a naturally-occurring adenosine deaminase that includes one or more mutations corresponding to any of the mutations provided herein (e.g., mutations in ecTadA). The corresponding residue in any homologous protein can be identified by, e.g., sequence alignment and determination of homologous residues. The mutations in any naturally-occurring adenosine deaminase (e.g., having homology to ecTadA) that correspond to any of the mutations described herein (e.g., any of the mutations identified in ecTadA) can be generated accordingly.

### Adenosine Deaminases

[0426] In some embodiments, fusion proteins described herein can comprise a deaminase domain which includes an adenosine deaminase. Such an adenosine deaminase domain of a base editor can facilitate the editing of an adenine (A) nucleobase to a guanine (G) nucleobase by deaminating the A to form inosine (I), which exhibits base pairing properties of G. Adenosine deaminase is capable of deaminating (i.e., removing an amine group) adenine of a deoxyadenosine residue in deoxyribonucleic acid (DNA).

[0427] In some embodiments, the adenosine deaminases provided herein are capable of deaminating adenine. In some embodiments, the adenosine deaminases provided herein are capable of deaminating adenine in a deoxyadenosine residue of DNA. In some embodiments, the adenine deaminase is a naturally-occurring adenosine deaminase that includes one or more mutations corresponding to any of the mutations provided herein (e.g., mutations in ecTadA). One of skill in the art will be able to identify the corresponding residue in any homologous protein, e.g., by sequence alignment and determination of homologous residues. Accordingly, one of skill in the art would be able to generate mutations in any naturally-occurring adenosine deaminase (e.g., having homology to ecTadA) that corresponds to any of the mutations described herein, e.g., any of the mutations identified in ecTadA. In some embodiments, the adenosine deaminase is from a prokaryote. In some embodiments, the adenosine deaminase is from a bacterium. In some embodiments, the adenosine deaminase is from Escherichia coli, Staphylococcus aureus, Salmonella typhi, Shewanella putrefaciens, Haemophilus influenzae, Caulobacter crescentus, or Bacillus subtilis. In some embodiments, the adenosine deaminase is from E. coli.

[0428] The disclosure provides adenosine deaminase variants that have increased efficiency (>50-60%) and specificity. In particular, the adenosine deaminase variants described herein are more likely to edit a desired base within a polynucleotide, and are less likely to edit bases that are not intended to be altered (i.e., “bystanders”).

[0429] In some embodiments, the adenosine deaminase is a TadA deaminase. In particular embodiments, the TadA is any one of the TadA described in PCT/US2017/045381 (WO 2018/027078), which is incorporated herein by reference in its entirety.

[0430] In some embodiments, the nucleobase editors of the disclosure are adenosine deaminase variants comprising an alteration in the following sequence:

(also termed TadA*7.10)
MSEVEFSHEYWMRHALTLAKRARDEREVPVGAVLVLNNRVIGEGWNR
AIGLHDPTAHAEIMALRQGGLVMQNYRLIDATLYVTFEPCVMCAGAM
IHSRIGRVVFGVRNAKTGAAGSLMDVLHYPGMNHRVEITEGILADEC
AALLCYFFRMPRQVFNAQKKAQSSTD.

[0431] In particular embodiments, the fusion proteins comprise a single (e.g., provided as a monomer) TadA*8 variant. In some embodiments, the TadA*8 is linked to a Cas9 nickase. In some embodiments, the fusion proteins of the disclosure comprise as a heterodimer of a wild-type TadA (TadA(wt)) linked to a TadA*8 variant. In other embodiments, the fusion proteins of the disclosure comprise as a heterodimer of a TadA*7.10 linked to a TadA*8 variant. In some embodiments, the base editor is ABE8 comprising a TadA*8 variant monomer. In some embodiments, the base editor is ABE8 comprising a heterodimer of a TadA*8 variant and a TadA(wt). In some embodiments, the base editor is ABE8 comprising a heterodimer of a TadA*8 variant and TadA*7.10. In some embodiments, the base editor is ABE8 comprising a heterodimer of a TadA*8 variant. In some embodiments, the TadA*8 variant is selected from Table 9. In some embodiments, the ABE8 is selected from Table 8, 9, 10, or 11. The relevant sequences follow:

Wild-type TadA (TadA(wt)) or “the TadA
reference sequence”
MSEVEFSHEYWMRHALTLAKRAWDEREVPVGAVLVHNNRVIGEGWNR
PIGRHDPTAHAEIMALRQGGLVMQNYRLIDATLYVTLEPCVMCAGAM
IHSRIGRVVFGARDAKTGAAGSLMDVLHHPGMNHRVEITEGILADEG
AALLSDFFRMRRQEIKAQKKAQSSTD
TadA*7.10:
MSEVEFSHEYW MRHALTLAKR ARDEREVPVG AVLVLNNRVI
GEGWNRAIGL HDPTAHAEIM ALRQGGLVMQ NYRLIDATLY
VTFEPCVMCA GAMIHSRIGR VVFGVRNAKT GAAGSLMDVL
HYPGMNHRVE ITEGILADEC AALLCYFFRM PRQVFNAQKK
AQSSTD

[0432] In some embodiments, the adenosine deaminase comprises an amino acid sequence that is at least 60%, at least 65%, at least 70%, at least 75%, at least 80%, at least 85%, at least 90%, at least 95%, at least 96%, at least 97%, at least 98%, at least 99%, or at least 99.5% identical to any one of the amino acid sequences set forth in any of the adenosine deaminases provided herein. It should be appreciated that adenosine deaminases provided herein may include one or more mutations (e.g., any of the mutations provided herein). The disclosure provides any deaminase domains with a certain percent identity plus any of the mutations or combinations thereof described herein. In some embodiments, the adenosine deaminase comprises an amino acid sequence that has 1, 2, 3, 4, 5, 6, 7, 8, 9, 10, 11, 12, 13, 14, 15, 16, 17, 18, 19, 20, 21, 22, 21, 24, 25, 26, 27, 28, 29, 30, 31, 32, 33, 34, 35, 36, 37, 38, 39, 40, 41, 42, 43, 44, 45, 46, 47, 48, 49, 50, or more mutations compared to a reference sequence, or any of the adenosine deaminases provided herein. In some embodiments, the adenosine deaminase comprises an amino acid sequence that has at least 5, at least 10, at least 15, at least 20, at least 25, at least 30, at least 35, at least 40, at least 45, at least 50, at least 60, at least 70, at least 80, at least 90, at least 100, at least 110, at least 120, at least 130, at least 140, at least 150, at least 160, or at least 170 identical contiguous amino acid residues as compared to any one of the amino acid sequences known in the art or described herein.

[0433] In some embodiments the TadA deaminase is a full-length E. coli TadA deaminase. For example, in certain embodiments, the adenosine deaminase comprises the amino acid sequence:

MRRAFITGVFFLSEVEFSHEYWMRHALTLAKRAWDEREVPVGAVLVH
NNRVIGEGWNRPIGRHDPTAHAEIMALRQGGLVMQNYRLIDATLYVT
LEPCVMCAGAMIHSRIGRVVFGARDAKTGAAGSLMDVLHHPGMNHRV
EITEGILADEGAALLSDFFRMRRQEIKAQKKAQSSTD.

[0434] It should be appreciated, however, that additional adenosine deaminases useful in the present application would be apparent to the skilled artisan and are within the scope of this disclosure. For example, the adenosine deaminase may be a homolog of adenosine deaminase acting on tRNA (ADAT). Without limitation, the amino acid sequences of exemplary AD AT homologs include the following:

Staphylococcus aureus TadA:
MGSHMTNDIYFMTLAIEEAKKAAQLGEVPIGAIITKDDEVIARAHNL
RETLQQPTAHAEHIAIERAAKVLGSWRLEGCTLYVTLEPCVMCAGTI
VMSRIPRVVYGADDPKGGCSGSLMNLLQQSNFNHRAIVDKGVLKEAC
STLLTTFFKNLRANKKSTN
Bacillus subtilis TadA:
MTQDELYMKEAIKEAKKAEEKGEVPIGAVLVINGEIIARAHNLRETE
QRSIAHAEMLVIDEACKALGTWRLEGATLYVTLEPCPMCAGAVVLSR
VEKVVFGAFDPKGGCSGTLMNLLQEERFNHQAEVVSGVLEEECGGML
SAFFRELRKKKKAARKNLSE
Salmonella typhimurium (S. typhimurium) TadA:
MPPAFITGVTSLSDVELDHEYWMRHALTLAKRAWDEREVPVGAVLVH
NHRVIGEGWNRPIGRHDPTAHAEIMALRQGGLVLQNYRLLDTTLYVT
LEPCVMCAGAMVHSRIGRVVFGARDAKTGAAGSLIDVLHHPGMNHRV
EIIEGVLRDECATLLSDFFRMRRQEIKALKKADRAEGAGPAV
Shewanella putrefaciens (S. putrefaciens) TadA:
MDEYWMQVAMQMAEKAEAAGEVPVGAVLVKDGQQIATGYNLSISQHD
PTAHAEILCLRSAGKKLENYRLLDATLYITLEPCAMCAGAMVHSRIA
RVVYGARDEKTGAAGTVVNLLQHPAFNHQVEVTSGVLAEACSAQLSR
FFKRRRDEKKALKLAQRAQQGIE
Haemophilus influenzae F3031 (H. influenzae)
TadA:
MDAAKVRSEFDEKMMRYALELADKAEALGEIPVGAVLVDDARNIIGE
GWNLSIVQSDPTAHAEIIALRNGAKNIQNYRLLNSTLYVTLEPCTMC
AGAILHSRIKRLVFGASDYKTGAIGSRFHFFDDYKMNHTLEITSGVL
AEECSQKLSTFFQKRREEKKIEKALLKSLSDK
Caulobacter crescentus (C. crescentus) TadA:
MRTDESEDQDHRMMRLALDAARAAAEAGETPVGAVILDPSTGEVIAT
AGNGPIAAHDPTAHAEIAAMRAAAAKLGNYRLTDLTLVVTLEPCAMC
AGAISHARIGRVVFGADDPKGGAVVHGPKFFAQPTCHWRPEVTGGVL
ADESADLLRGFFRARRKAKI
Geobacter sulfurreducens (G. sulfurreducens)
TadA:
MSSLKKTPIRDDAYWMGKAIREAAKAAARDEVPIGAVIVRDGAVIGR
GHNLREGSNDPSAHAEMIAIRQAARRSANWRLTGATLYVTLEPCLMC
MGAIILARLERVVFGCYDPKGGAAGSLYDLSADPRLNHQVRLSPGVC
QEECGTMLSDFFRDLRRRKKAKATPALFIDERKVPPEP

[0435] An embodiment of E. Coli TadA (ecTadA) includes the following:

MSEVEFSHEYWMRHALTLAKRARDEREVPVGAVLVLNNRVIGEGWNR
AIGLHDPTAHAEIMALRQGGLVMQNYRLIDATLYVTFEPCVMCAGAM
IHSRIGRVVFGVRNAKTGAAGSLMDVLHYPGMNHRVEITEGILADEC
AALLCYFFRMPRQVFNAQKKAQSSTD

[0436] In some embodiments, the adenosine deaminase is from a prokaryote. In some embodiments, the adenosine deaminase is from a bacterium. In some embodiments, the adenosine deaminase is from Escherichia coli, Staphylococcus aureus, Salmonella typhi, Shewanella putrefaciens, Haemophilus influenzae, Caulobacter crescentus, or Bacillus subtilis. In some embodiments, the adenosine deaminase is from E. coli.

[0437] In one embodiment, a fusion protein of the disclosure comprises a wild-type TadA linked to TadA*7.10, which is linked to Cas9 nickase. In particular embodiments, the fusion proteins comprise a single TadA*7.10 domain (e.g., provided as a monomer). In other embodiments, the ABE7.10 editor comprises TadA*7.10 and TadA(wt), which are capable of forming heterodimers.

[0438] In some embodiments, the adenosine deaminase comprises an amino acid sequence that is at least 60%, at least 65%, at least 70%, at least 75%, at least 80%, at least 85%, at least 90%, at least 95%, at least 96%, at least 97%, at least 98%, at least 99%, or at least 99.5% identical to any one of the amino acid sequences set forth in any of the adenosine deaminases provided herein. It should be appreciated that adenosine deaminases provided herein may include one or more mutations (e.g., any of the mutations provided herein). The disclosure provides any deaminase domains with a certain percent identity plus any of the mutations or combinations thereof described herein. In some embodiments, the adenosine deaminase comprises an amino acid sequence that has 1, 2, 3, 4, 5, 6, 7, 8, 9, 10, 11, 12, 13, 14, 15, 16, 17, 18, 19, 20, 21, 22, 21, 24, 25, 26, 27, 28, 29, 30, 31, 32, 33, 34, 35, 36, 37, 38, 39, 40, 41, 42, 43, 44, 45, 46, 47, 48, 49, 50, or more mutations compared to a reference sequence, or any of the adenosine deaminases provided herein. In some embodiments, the adenosine deaminase comprises an amino acid sequence that has at least 5, at least 10, at least 15, at least 20, at least 25, at least 30, at least 35, at least 40, at least 45, at least 50, at least 60, at least 70, at least 80, at least 90, at least 100, at least 110, at least 120, at least 130, at least 140, at least 150, at least 160, or at least 170 identical contiguous amino acid residues as compared to any one of the amino acid sequences known in the art or described herein.

[0439] It should be appreciated that any of the mutations provided herein (e.g., based on the TadA reference sequence) can be introduced into other adenosine deaminases, such as E. coli TadA (ecTadA), S. aureus TadA (saTadA), or other adenosine deaminases (e.g., bacterial adenosine deaminases). It would be apparent to the skilled artisan that additional deaminases may similarly be aligned to identify homologous amino acid residues that can be mutated as provided herein. Thus, any of the mutations identified in the TadA reference sequence can be made in other adenosine deaminases (e.g., ecTada) that have homologous amino acid residues. It should also be appreciated that any of the mutations provided herein can be made individually or in any combination in the TadA reference sequence or another adenosine deaminase.

[0440] In some embodiments, the adenosine deaminase comprises a D108X mutation in the TadA reference sequence, or a corresponding mutation in another adenosine deaminase (e.g., ecTadA), where X indicates any amino acid other than the corresponding amino acid in the wild-type adenosine deaminase. In some embodiments, the adenosine deaminase comprises a D108G, D108N, D108V, D108A, or D108Y mutation, or a corresponding mutation in another adenosine deaminase.

[0441] In some embodiments, the adenosine deaminase comprises an A106X mutation in TadA reference sequence, or a corresponding mutation in another adenosine deaminase (e.g., ecTadA), where X indicates any amino acid other than the corresponding amino acid in the wild-type adenosine deaminase. In some embodiments, the adenosine deaminase comprises an A106V mutation in TadA reference sequence, or a corresponding mutation in another adenosine deaminase (e.g., wild-type TadA or ecTadA).

[0442] In some embodiments, the adenosine deaminase comprises a E155X mutation in TadA reference sequence, or a corresponding mutation in another adenosine deaminase (e.g., ecTadA), where the presence of X indicates any amino acid other than the corresponding amino acid in the wild-type adenosine deaminase. In some embodiments, the adenosine deaminase comprises a E155D, E155G, or E155V mutation in TadA reference sequence, or a corresponding mutation in another adenosine deaminase (e.g., ecTadA).

[0443] In some embodiments, the adenosine deaminase comprises a D147X mutation in TadA reference sequence, or a corresponding mutation in another adenosine deaminase (e.g., ecTadA), where the presence of X indicates any amino acid other than the corresponding amino acid in the wild-type adenosine deaminase. In some embodiments, the adenosine deaminase comprises a D147Y, mutation in TadA reference sequence, or a corresponding mutation in another adenosine deaminase (e.g., ecTadA).

[0444] In some embodiments, the adenosine deaminase comprises an A106X, E155X, or D147X, mutation in the TadA reference sequence, or a corresponding mutation in another adenosine deaminase (e.g., ecTadA), where X indicates any amino acid other than the corresponding amino acid in the wild-type adenosine deaminase. In some embodiments, the adenosine deaminase comprises an E155D, E155G, or E155V mutation. In some embodiments, the adenosine deaminase comprises a D147Y.

[0445] For example, an adenosine deaminase can contain a D108N, a A106V, a E155V, and/or a D147Y mutation in TadA reference sequence, or a corresponding mutation in another adenosine deaminase (e.g., ecTadA). In some embodiments, an adenosine deaminase comprises the following group of mutations (groups of mutations are separated by a “;”) in TadA reference sequence, or corresponding mutations in another adenosine deaminase (e.g., ecTadA): D108N and A106V; D108N and E155V; D108N and D147Y; A106V and E155V; A106V and D147Y; E155V and D147Y; D108N, A106V, and E155V; D108N, A106V, and D147Y; D108N, E155V, and D147Y; A106V, E155V, and D147Y; and D108N, A106V, E155V, and D147Y. It should be appreciated, however, that any combination of corresponding mutations provided herein can be made in an adenosine deaminase (e.g., ecTadA).

[0446] In some embodiments, the adenosine deaminase comprises one or more of a H8X, T17X, L18X, W23X, L34X, W45X, R51X, A56X, E59X, E85X, M94X, I95X, V102X, F104X, A106X, R107X, D108X, K110X, M118X, N127X, A138X, F149X, M151X, R153X, Q154X, I156X, and/or K157X mutation in TadA reference sequence, or one or more corresponding mutations in another adenosine deaminase (e.g., ecTadA), where the presence of X indicates any amino acid other than the corresponding amino acid in the wild-type adenosine deaminase. In some embodiments, the adenosine deaminase comprises one or more of H8Y, T17S, L18E, W23L, L34S, W45L, R51H, A56E, or A56S, E59G, E85K, or E85G, M94L, I95L, V102A, F104L, A106V, R107C, or R107H, or R107P, D108G, or D108N, or D108V, or D108A, or D108Y, K110I, M118K, N127S, A138V, F149Y, M151V, R153C, Q154L, I156D, and/or K157R mutation in TadA reference sequence, or one or more corresponding mutations in another adenosine deaminase (e.g., ecTadA).

[0447] In some embodiments, the adenosine deaminase comprises one or more of a H8X, D108X, and/or N127X mutation in TadA reference sequence, or one or more corresponding mutations in another adenosine deaminase (e.g., ecTadA), where X indicates the presence of any amino acid. In some embodiments, the adenosine deaminase comprises one or more of a H8Y, D108N, and/or N127S mutation in TadA reference sequence, or one or more corresponding mutations in another adenosine deaminase (e.g., ecTadA).

[0448] In some embodiments, the adenosine deaminase comprises one or more of H8X, R26X, M61X, L68X, M70X, A106X, D108X, A109X, N127X, D147X, R152X, Q154X, E155X, K161X, Q163X, and/or T166X mutation in TadA reference sequence, or one or more corresponding mutations in another adenosine deaminase (e.g., ecTadA), where X indicates the presence of any amino acid other than the corresponding amino acid in the wild-type adenosine deaminase. In some embodiments, the adenosine deaminase comprises one or more of H8Y, R26W, M61I, L68Q, M70V, A106T, D108N, A109T, N127S, D147Y, R152C, Q154H or Q154R, E155G or E155V or E155D, K161Q, Q163H, and/or T166P mutation in TadA reference sequence, or one or more corresponding mutations in another adenosine deaminase (e.g., ecTadA).

[0449] In some embodiments, the adenosine deaminase comprises one, two, three, four, five, or six mutations selected from the group consisting of H8X, D108X, N127X, D147X, R152X, and Q154X in TadA reference sequence, or a corresponding mutation or mutations in another adenosine deaminase (e.g., ecTadA), where X indicates the presence of any amino acid other than the corresponding amino acid in the wild-type adenosine deaminase. In some embodiments, the adenosine deaminase comprises one, two, three, four, five, six, seven, or eight mutations selected from the group consisting of H8X, M61X, M70X, D108X, N127X, Q154X, E155X, and Q163X in TadA reference sequence, or a corresponding mutation or mutations in another adenosine deaminase (e.g., ecTadA), where X indicates the presence of any amino acid other than the corresponding amino acid in the wild-type adenosine deaminase. In some embodiments, the adenosine deaminase comprises one, two, three, four, or five, mutations selected from the group consisting of H8X, D108X, N127X, E155X, and T166X in TadA reference sequence, or a corresponding mutation or mutations in another adenosine deaminase (e.g., ecTadA), where X indicates the presence of any amino acid other than the corresponding amino acid in the wild-type adenosine deaminase.

[0450] In some embodiments, the adenosine deaminase comprises one, two, three, four, five, or six mutations selected from the group consisting of H8X, A106X, D108X, mutation or mutations in another adenosine deaminase, where X indicates the presence of any amino acid other than the corresponding amino acid in the wild-type adenosine deaminase. In some embodiments, the adenosine deaminase comprises one, two, three, four, five, six, seven, or eight mutations selected from the group consisting of H8X, R26X, L68X, D108X, N127X, D147X, and E155X, or a corresponding mutation or mutations in another adenosine deaminase, where X indicates the presence of any amino acid other than the corresponding amino acid in the wild-type adenosine deaminase. In some embodiments, the adenosine deaminase comprises one, two, three, four, or five, mutations selected from the group consisting of H8X, D108X, A109X, N127X, and E155X in TadA reference sequence, or a corresponding mutation or mutations in another adenosine deaminase (e.g., ecTadA), where X indicates the presence of any amino acid other than the corresponding amino acid in the wild-type adenosine deaminase.

[0451] In some embodiments, the adenosine deaminase comprises one, two, three, four, five, or six mutations selected from the group consisting of H8Y, D108N, N127S, D147Y, R152C, and Q154H in TadA reference sequence, or a corresponding mutation or mutations in another adenosine deaminase (e.g., ecTadA). In some embodiments, the adenosine deaminase comprises one, two, three, four, five, six, seven, or eight mutations selected from the group consisting of H8Y, M61I, M70V, D108N, N127S, Q154R, E155G and Q163H in TadA reference sequence, or a corresponding mutation or mutations in another adenosine deaminase (e.g., ecTadA). In some embodiments, the adenosine deaminase comprises one, two, three, four, or five, mutations selected from the group consisting of H8Y, D108N, N127S, E155V, and T166P in TadA reference sequence, or a corresponding mutation or mutations in another adenosine deaminase (e.g., ecTadA). In some embodiments, the adenosine deaminase comprises one, two, three, four, five, or six mutations selected from the group consisting of H8Y, A106T, D108N, N127S, E155D, and K161Q in TadA reference sequence, or a corresponding mutation or mutations in another adenosine deaminase (e.g., ecTadA). In some embodiments, the adenosine deaminase comprises one, two, three, four, five, six, seven, or eight mutations selected from the group consisting of H8Y, R26W, L68Q, D108N, N127S, D147Y, and E155V in TadA reference sequence, or a corresponding mutation or mutations in another adenosine deaminase (e.g., ecTadA). In some embodiments, the adenosine deaminase comprises one, two, three, four, or five, mutations selected from the group consisting of H8Y, D108N, A109T, N127S, and E155G in TadA reference sequence, or a corresponding mutation or mutations in another adenosine deaminase (e.g., ecTadA).

[0452] Any of the mutations provided herein and any additional mutations (e.g., based on the ecTadA amino acid sequence) can be introduced into any other adenosine deaminases. Any of the mutations provided herein can be made individually or in any combination in TadA reference sequence or another adenosine deaminase (e.g., ecTadA).

[0453] Details of A to G nucleobase editing proteins are described in International PCT Application No. PCT/2017/045381 (WO2018/027078) and Gaudelli, N. M., et al., “Programmable base editing of A⋅T to G⋅C in genomic DNA without DNA cleavage” Nature, 551, 464-471 (2017), the entire contents of which are hereby incorporated by reference.

[0454] In some embodiments, the adenosine deaminase comprises one or more corresponding mutations in another adenosine deaminase (e.g., ecTadA). In some embodiments, the adenosine deaminase comprises a D108N, D108G, or D108V mutation in TadA reference sequence, or corresponding mutations in another adenosine deaminase (e.g., ecTadA). In some embodiments, the adenosine deaminase comprises a A106V and D108N mutation in TadA reference sequence, or corresponding mutations in another adenosine deaminase (e.g., ecTadA). In some embodiments, the adenosine deaminase comprises R107C and D108N mutations in TadA reference sequence, or corresponding mutations in another adenosine deaminase (e.g., ecTadA). In some embodiments, the adenosine deaminase comprises a H8Y, D108N, N127S, D147Y, and Q154H mutation in TadA reference sequence, or corresponding mutations in another adenosine deaminase (e.g., ecTadA). In some embodiments, the adenosine deaminase comprises a H8Y, D108N, N127S, D147Y, and E155V mutation in TadA reference sequence, or corresponding mutations in another adenosine deaminase (e.g., ecTadA). In some embodiments, the adenosine deaminase comprises a D108N, D147Y, and E155V mutation in TadA reference sequence, or corresponding mutations in another adenosine deaminase (e.g., ecTadA). In some embodiments, the adenosine deaminase comprises a H8Y, D108N, and N127S mutation in TadA reference sequence, or corresponding mutations in another adenosine deaminase (e.g., ecTadA). In some embodiments, the adenosine deaminase comprises a A106V, D108N, D147Y and E155V mutation in TadA reference sequence, or corresponding mutations in another adenosine deaminase (e.g., ecTadA).

[0455] In some embodiments, the adenosine deaminase comprises one or more of a S2X, H8X, I49X, L84X, H123X, N127X, I156X and/or K160X mutation in TadA reference sequence, or one or more corresponding mutations in another adenosine deaminase, where the presence of X indicates any amino acid other than the corresponding amino acid in the wild-type adenosine deaminase. In some embodiments, the adenosine deaminase comprises one or more of S2A, H8Y, I49F, L84F, H123Y, N127S, I156F and/or K160S mutation in TadA reference sequence, or one or more corresponding mutations in another adenosine deaminase (e.g., ecTadA).

[0456] In some embodiments, the adenosine deaminase comprises an L84X mutation adenosine deaminase, where X indicates any amino acid other than the corresponding amino acid in the wild-type adenosine deaminase. In some embodiments, the adenosine deaminase comprises an L84F mutation in TadA reference sequence, or a corresponding mutation in another adenosine deaminase (e.g., ecTadA).

[0457] In some embodiments, the adenosine deaminase comprises an H123X mutation in TadA reference sequence, or a corresponding mutation in another adenosine deaminase (e.g., ecTadA), where X indicates any amino acid other than the corresponding amino acid in the wild-type adenosine deaminase. In some embodiments, the adenosine deaminase comprises an H123Y mutation in TadA reference sequence, or a corresponding mutation in another adenosine deaminase (e.g., ecTadA).

[0458] In some embodiments, the adenosine deaminase comprises an I156X mutation in TadA reference sequence, or a corresponding mutation in another adenosine deaminase (e.g., ecTadA), where X indicates any amino acid other than the corresponding amino acid in the wild-type adenosine deaminase. In some embodiments, the adenosine deaminase comprises an I156F mutation in TadA reference sequence, or a corresponding mutation in another adenosine deaminase (e.g., ecTadA).

[0459] In some embodiments, the adenosine deaminase comprises one, two, three, four, five, six, or seven mutations selected from the group consisting of L84X, A106X, D108X, H123X, D147X, E155X, and I156X in TadA reference sequence, or a corresponding mutation or mutations in another adenosine deaminase (e.g., ecTadA), where X indicates the presence of any amino acid other than the corresponding amino acid in the wild-type adenosine deaminase. In some embodiments, the adenosine deaminase comprises one, two, three, four, five, or six mutations selected from the group consisting of S2X, I49X, A106X, D108X, D147X, and E155X in TadA reference sequence, or a corresponding mutation or mutations in another adenosine deaminase (e.g., ecTadA), where X indicates the presence of any amino acid other than the corresponding amino acid in the wild-type adenosine deaminase. In some embodiments, the adenosine deaminase comprises one, two, three, four, or five, mutations selected from the group consisting of H8X, A106X, D108X, N127X, and K160X in TadA reference sequence, or a corresponding mutation or mutations in another adenosine deaminase (e.g., ecTadA), where X indicates the presence of any amino acid other than the corresponding amino acid in the wild-type adenosine deaminase.

[0460] In some embodiments, the adenosine deaminase comprises one, two, three, four, five, six, or seven mutations selected from the group consisting of L84F, A106V, D108N, H123Y, D147Y, E155V, and I156F in TadA reference sequence, or a corresponding mutation or mutations in another adenosine deaminase (e.g., ecTadA). In some embodiments, the adenosine deaminase comprises one, two, three, four, five, or six mutations selected from the group consisting of S2A, I49F, A106V, D108N, D147Y, and E155V in TadA reference sequence.

[0461] In some embodiments, the adenosine deaminase comprises one, two, three, four, or five, mutations selected from the group consisting of H8Y, A106T, D108N, N127S, and K160S in TadA reference sequence, or a corresponding mutation or mutations in another adenosine deaminase (e.g., ecTadA).

[0462] In some embodiments, the adenosine deaminase comprises one or more of a E25X, R26X, R107X, A142X, and/or A143X mutation in TadA reference sequence, or one or more corresponding mutations in another adenosine deaminase (e.g., ecTadA), where the presence of X indicates any amino acid other than the corresponding amino acid in the wild-type adenosine deaminase. In some embodiments, the adenosine deaminase comprises one or more of E25M, E25D, E25A, E25R, E25V, E25S, E25Y, R26G, R26N, R26Q, R26C, R26L, R26K, R107P, R107K, R107A, R107N, R107W, R107H, R107S, A142N, A142D, A142G, A143D, A143G, A143E, A143L, A143W, A143M, A143S, A143Q and/or A143R mutation in TadA reference sequence, or one or more corresponding mutations in another adenosine deaminase (e.g., ecTadA). In some embodiments, the adenosine deaminase comprises one or more of the mutations described herein corresponding to TadA reference sequence, or one or more corresponding mutations in another adenosine deaminase (e.g., ecTadA).

[0463] In some embodiments, the adenosine deaminase comprises an E25X mutation in TadA reference sequence, or a corresponding mutation in another adenosine deaminase (e.g., ecTadA), where X indicates any amino acid other than the corresponding amino acid in the wild-type adenosine deaminase. In some embodiments, the adenosine deaminase comprises an E25M, E25D, E25A, E25R, E25V, E25S, or E25Y mutation in TadA reference sequence, or a corresponding mutation in another adenosine deaminase (e.g., ecTadA).

[0464] In some embodiments, the adenosine deaminase comprises an R26X mutation in TadA reference sequence, or a corresponding mutation in another adenosine deaminase (e.g., ecTadA), where X indicates any amino acid other than the corresponding amino acid in the wild-type adenosine deaminase. In some embodiments, the adenosine deaminase comprises R26G, R26N, R26Q, R26C, R26L, or R26K mutation in TadA reference sequence, or a corresponding mutation in another adenosine deaminase (e.g., ecTadA).

[0465] In some embodiments, the adenosine deaminase comprises an R107X mutation in TadA reference sequence, or a corresponding mutation in another adenosine deaminase (e.g., ecTadA), where X indicates any amino acid other than the corresponding amino acid in the wild-type adenosine deaminase. In some embodiments, the adenosine deaminase comprises an R107P, R107K, R107A, R107N, R107W, R107H, or R107S mutation in TadA reference sequence, or a corresponding mutation in another adenosine deaminase (e.g., ecTadA).

[0466] In some embodiments, the adenosine deaminase comprises an A142X mutation in TadA reference sequence, or a corresponding mutation in another adenosine deaminase (e.g., ecTadA), where X indicates any amino acid other than the corresponding amino acid in the wild-type adenosine deaminase. In some embodiments, the adenosine deaminase comprises an A142N, A142D, A142G, mutation in TadA reference sequence, or a corresponding mutation in another adenosine deaminase (e.g., ecTadA).

[0467] In some embodiments, the adenosine deaminase comprises an A143X mutation in TadA reference sequence, or a corresponding mutation in another adenosine deaminase (e.g., ecTadA), where X indicates any amino acid other than the corresponding amino acid in the wild-type adenosine deaminase. In some embodiments, the adenosine deaminase comprises an A143D, A143G, A143E, A143L, A143W, A143M, A143S, A143Q and/or A143R mutation in TadA reference sequence, or a corresponding mutation in another adenosine deaminase (e.g., ecTadA).

[0468] In some embodiments, the adenosine deaminase comprises one or more of a H36X, N37X, P48X, I49X, R51X, M70X, N₇₂X, D77X, E134X, S146X, Q154X, K157X, and/or K161X mutation in TadA reference sequence, or one or more corresponding mutations in another adenosine deaminase (e.g., ecTadA), where the presence of X indicates any amino acid other than the corresponding amino acid in the wild-type adenosine deaminase. In some embodiments, the adenosine deaminase comprises one or more of H36L, N37T, N37S, P48T, P48L, I49V, R51H, R51L, M70L, N72S, D77G, E134G, S146R, S146C, Q154H, K157N, and/or K161T mutation in TadA reference sequence, or one or more corresponding mutations in another adenosine deaminase (e.g., ecTadA).

[0469] In some embodiments, the adenosine deaminase comprises an H36X mutation in TadA reference sequence, or a corresponding mutation in another adenosine deaminase (e.g., ecTadA), where X indicates any amino acid other than the corresponding amino acid in the wild-type adenosine deaminase. In some embodiments, the adenosine deaminase comprises an H36L mutation in TadA reference sequence, or a corresponding mutation in another adenosine deaminase (e.g., ecTadA).

[0470] In some embodiments, the adenosine deaminase comprises an N37X mutation in TadA reference sequence, or a corresponding mutation in another adenosine deaminase (e.g., ecTadA), where X indicates any amino acid other than the corresponding amino acid in the wild-type adenosine deaminase. In some embodiments, the adenosine deaminase comprises an N37T, or

[0471] N37S mutation in TadA reference sequence, or a corresponding mutation in another adenosine deaminase (e.g., ecTadA).

[0472] In some embodiments, the adenosine deaminase comprises an P48X mutation in TadA reference sequence, or a corresponding mutation in another adenosine deaminase (e.g., ecTadA), where X indicates any amino acid other than the corresponding amino acid in the wild-type adenosine deaminase. In some embodiments, the adenosine deaminase comprises an P48T, or P48L mutation in TadA reference sequence, or a corresponding mutation in another adenosine deaminase (e.g., ecTadA).

[0473] In some embodiments, the adenosine deaminase comprises an R51X mutation in TadA reference sequence, or a corresponding mutation in another adenosine deaminase, where X indicates any amino acid other than the corresponding amino acid in the wild-type adenosine deaminase. In some embodiments, the adenosine deaminase comprises an R51H, or R51L mutation in TadA reference sequence, or a corresponding mutation in another adenosine deaminase (e.g., ecTadA).

[0474] In some embodiments, the adenosine deaminase comprises an S146X mutation in TadA reference sequence, or a corresponding mutation in another adenosine deaminase (e.g., ecTadA), where X indicates any amino acid other than the corresponding amino acid in the wild-type adenosine deaminase. In some embodiments, the adenosine deaminase comprises an S146R, or S146C mutation in TadA reference sequence, or a corresponding mutation in another adenosine deaminase (e.g., ecTadA).

[0475] In some embodiments, the adenosine deaminase comprises an K157X mutation in TadA reference sequence, or a corresponding mutation in another adenosine deaminase (e.g., ecTadA), where X indicates any amino acid other than the corresponding amino acid in the wild-type adenosine deaminase. In some embodiments, the adenosine deaminase comprises a K157N mutation in TadA reference sequence, or a corresponding mutation in another adenosine deaminase (e.g., ecTadA).

[0476] In some embodiments, the adenosine deaminase comprises an P48X mutation in TadA reference sequence, or a corresponding mutation in another adenosine deaminase (e.g., ecTadA), where X indicates any amino acid other than the corresponding amino acid in the wild-type adenosine deaminase. In some embodiments, the adenosine deaminase comprises a P48S, P48T, or P48A mutation in TadA reference sequence, or a corresponding mutation in another adenosine deaminase (e.g., ecTadA).

[0477] In some embodiments, the adenosine deaminase comprises an A142X mutation in TadA reference sequence, or a corresponding mutation in another adenosine deaminase (e.g., ecTadA), where X indicates any amino acid other than the corresponding amino acid in the wild-type adenosine deaminase. In some embodiments, the adenosine deaminase comprises a A142N mutation in TadA reference sequence, or a corresponding mutation in another adenosine deaminase (e.g., ecTadA).

[0478] In some embodiments, the adenosine deaminase comprises an W23X mutation in TadA reference sequence, or a corresponding mutation in another adenosine deaminase (e.g., ecTadA), where X indicates any amino acid other than the corresponding amino acid in the wild-type adenosine deaminase. In some embodiments, the adenosine deaminase comprises a W23R, or W23L mutation in TadA reference sequence, or a corresponding mutation in another adenosine deaminase (e.g., ecTadA).

[0479] In some embodiments, the adenosine deaminase comprises an R152X mutation in TadA reference sequence, or a corresponding mutation in another adenosine deaminase (e.g., ecTadA), where X indicates any amino acid other than the corresponding amino acid in the wild-type adenosine deaminase. In some embodiments, the adenosine deaminase comprises a R152P, or R52H mutation in TadA reference sequence, or a corresponding mutation in another adenosine deaminase (e.g., ecTadA).

[0480] In one embodiment, the adenosine deaminase may comprise the mutations H36L, R51L, L84F, A106V, D108N, H123Y, S146C, D147Y, E155V, I156F, and K157N. In some embodiments, the adenosine deaminase comprises the following combination of mutations relative to TadA reference sequence, where each mutation of a combination is separated by a “_” and each combination of mutations is between parentheses:

### (A106V_D108N),

### (R107C_D108N),

### (H8Y_D108N_N127S_D147Y_Q154H),

### (H8Y_D108N_N127S_D147Y_E155V),

### (D108N_D147Y_E155V),

### (H8Y_D108N_N127S),

### (H8Y_D108N_N127S_D147Y_Q154H),

### (A106V_D108N_D147Y_E155V),

### (D108Q_D147Y_E155V),

### (D108M_D147Y_E155V),

### (D108L_D147Y_E155V),

### (D108K_D147Y_E155V),

### (D108I_D147Y_E155V),

### (D108F_D147Y_E155V),

### (A106V_D108N_D147Y),

### (A106V_D108M_D147Y_E155V),

### (E59A_A106V_D108N_D147Y_E155V),

[0481] (E59A cat dead_A106V_D108N_D147Y_E155V),

### (L84F_A106V_D108N_H123Y_D147Y_E155V_I156Y),

### (L84F_A106V_D108N_H123Y_D147Y_E155V_I156F),

### (D103A_D104N),

### (G22P_D103A_D104N),

### (D103A_D104N_S138A),

### (R26G_L84F_A106V_R107H_D108N_H123Y_A142N_A143D_D147Y_E155V_I156F),

### (E25G_R26G_L84F_A106V_R107H_D108N_H123Y_A142N_A143D_D147Y_E155V_I156F),

### (E25D_R26G_L84F_A106V_R107K_D108N_H123Y_A142N_A143G_D147Y_E155V_I156F),

### (R26Q_L84F_A106V_D108N_H123Y_A142N_D147Y_E155V_I156F),

### (E25M_R26G_L84F_A106V_R107P_D108N_H123Y_A142N_A143D_D147Y_E155V_I156F),

### (R26C_L84F_A106V_R107H_D108N_H123Y_A142N_D147Y_E155V_I156F),

### (L84F_A106V_D108N_H123Y_A142N_A143L_D147Y_E155V_I156F),

### (R26G_L84F_A106V_D108N_H123Y_A142N_D147Y_E155V_I156F),

### (E25A_R26G_L84F_A106V_R107N_D108N_H123Y_A142N_A143E_D147Y_E155V_I156F),

### (R26G_L84F_A106V_R107H_D108N_H123Y_A142N_A143D_D147Y_E155V_I156F),

### (A106V_D108N_A142N_D147Y_E155V),

### (R26G_A106V_D108N_A142N_D147Y_E155V),

### (E25D_R26G_A106V_R107K_D108N_A142N_A143G_D147Y_E155V),

### (R26G_A106V_D108N_R107H_A142N_A143D_D147Y_E155V),

### (E25D_R26G_A106V_D108N_A142N_D147Y_E155V),

### (A106V_R107K_D108N_A142N_D147Y_E155V),

### (A106V_D108N_A142N_A143G_D147Y_E155V),

### (A106V_D108N_A142N_A143L_D147Y_E155V),

### (H36L_R51L_L84F_A106V_D108N_H123Y_S146C_D147Y_E155V_I156F_K157N),

### (N37T_P48T_M70L_L84F_A106V_D108N_H123Y_D147Y_I49V_E155V_I156F),

### (N37S_L84F_A106V_D108N_H123Y_D147Y_E155V_I156F_K161T),

### (H36L_L84F_A106V_D108N_H123Y_D147Y_Q154H_E155V_I156F),

### (N72S_L84F_A106V_D108N_H123Y_S146R_D147Y_E155V_I156F),

### (H36L_P48L_L84F_A106V_D108N_H123Y_E134G_D147Y_E155V_I156F),

### (H36L_L84F_A106V_D108N_H123Y_D147Y_E155V_I156F_K157N),

### (H36L_L84F_A106V_D108N_H123Y_S146C_D147Y_E155V_I156F),

### (L84F_A106V_D108N_H123Y_S146R_D147Y_E155V_I156F_K161T),

### (N37S_R51H_D77G_L84F_A106V_D108N_H123Y_D147Y_E155V_I156F),

### (R51L_L84F_A106V_D108N_H123Y_D147Y_E155V_I156F_K157N),

### (D24G_Q71R_L84F_H96L_A106V_D108N_H123Y_D147Y_E155V_I156F_K160E),

### (H36L_G67V_L84F_A106V_D108N_H123Y_S146T_D147Y_E155V_I156F),

### (Q71L_L84F_A106V_D108N_H123Y_L137M_A143E_D147Y_E155V_I156F),

### (E25G_L84F_A106V_D108N_H123Y_D147Y_E155V_I156F_Q159L),

### (L84F_A91T_F104I_A106V_D108N_H123Y_D147Y_E155V_I156F),

### (N72D_L84F_A106V_D108N_H123Y_G125A_D147Y_E155V_I156F),

### (P48S_L84F_S97C_A106V_D108N_H123Y_D147Y_E155V_I156F),

### (W23G_L84F_A106V_D108N_H123Y_D147Y_E155V_I156F),

### (D24G_P48L_Q71R_L84F_A106V_D108N_H123Y_D147Y_E155V_I156F_Q159L),

### (L84F_A106V_D108N_H123Y_A142N_D147Y_E155V_I156F),

### (H36L_R51L_L84F_A106V_D108N_H123Y_A142N_S146C_D147Y_E155V_I156F_K157N), (N37S_L84F_A106V_D108N_H123Y_A142N_D147Y_E155V_I156F_K161T),

### (L84F_A106V_D108N_D147Y_E155V_I156F),

### (R51L_L84F_A106V_D108N_H123Y_S146C_D147Y_E155V_I156F_K157N_K161T),

### (L84F_A106V_D108N_H123Y_S146C_D147Y_E155V_I156F_K161T),

### (L84F_A106V_D108N_H123Y_S146C_D147Y_E155V_I156F_K157N_K160E_K161T),

### (L84F_A106V_D108N_H123Y_S146C_D147Y_E155V_I156F_K157N_K160E),

### (R74Q_L84F_A106V_D108N_H123Y_D147Y_E155V_I156F),

### (R74A_L84F_A106V_D108N_H123Y_D147Y_E155V_I156F),

### (L84F_A106V_D108N_H123Y_D147Y_E155V_I156F),

### (R74Q_L84F_A106V_D108N_H123Y_D147Y_E155V_I156F),

### (L84F_R98Q_A106V_D108N_H123Y_D147Y_E155V_I156F),

### (L84F_A106V_D108N_H123Y_R129Q_D147Y_E155V_I156F),

### (P48S_L84F_A106V_D108N_H123Y_A142N_D147Y_E155V_I156F), (P48S_A142N),

### (P48T_I49V_L84F_A106V_D108N_H123Y_A142N_D147Y_E155V_I156F_L157N), (P48T_I49V_A142N),

### (H36L_P48S_R51L_L84F_A106V_D108N_H123Y_S146C_D147Y_E155V_I156F_K157N),

### (H36L_P48S_R51L_L84F_A106V_D108N_H123Y_S146C_A142N_D147Y_E155V_I156F

### (H36L_P48T_I49V_R51L_L84F_A106V_D108N_H123Y_S146C_D147Y_E155V_I156F K157N),

### (H36L_P48T_I49V_R51L_L84F_A106V_D108N_H123Y_A142N_S146C_D147Y_E155V_I156F_K157N),

### (H36L_P48A_R51L_L84F_A106V_D108N_H123Y_S146C_D147Y_E155V_I156F_K157N),

### (H36L_P48A_R51L_L84F_A106V_D108N_H123Y_A142N_S146C_D147Y_E155V_I156F_K157N),

### (H36L_P48A_R51L_L84F_A106V_D108N_H123Y_S146C_A142N_D147Y_E155V_I156F_K157N),

### (W23L_H36L_P48A_R51L_L84F_A106V_D108N_H123Y_S146C_D147Y_E155V_I156F_K157N),

### (W23R_H36L_P48A_R51L_L84F_A106V_D108N_H123Y_S146C_D147Y_E155V_I156F_K157N),

### (W23L_H36L_P48A_R51L_L84F_A106V_D108N_H123Y_S146R_D147Y_E155V_I156F_K161T),

### (H36L_P48A_R51L_L84F_A106V_D108N_H123Y_S146C_D147Y_R152H_E155V_I156F_K157N),

### (H36L_P48A_R51L_L84F_A106V_D108N_H123Y_S146C_D147Y_R152P_E155V_I156F_K157N),

### (W23L_H36L_P48A_R51L_L84F_A106V_D108N_H123Y_S146C_D147Y_R152P_E155V_I156F_K157N),

### (W23L_H36L_P48A_R51L_L84F_A106V_D108N_H123Y_A142A S146C_D147Y_E155V_I156F_K157N),

### (W23L_H36L_P48A_R51L_L84F_A106V_D108N_H123Y_A142A S146C_D147Y_R152P_E155V_I156F_K157N),

### (W23L_H36L_P48A_R51L_L84F_A106V_D108N_H123Y_S146R_D147Y_E155V_I156F_K161T),

### (W23R_H36L_P48A_R51L_L84F_A106V_D108N_H123Y_S146C_D147Y_R152P_E155V_I156F_K157N),

### (H36L_P48A_R51L_L84F_A106V_D108N_H123Y_A142N_S146C_D147Y_R152P_E155V_I156F_K157N).

[0482] In certain embodiments, the fusion proteins provided herein comprise one or more features that improve the base editing activity of the fusion proteins. For example, any of the fusion proteins provided herein may comprise a Cas9 domain that has reduced nuclease activity. In some embodiments, any of the fusion proteins provided herein may have a Cas9 domain that does not have nuclease activity (dCas9), or a Cas9 domain that cuts one strand of a duplexed DNA molecule, referred to as a Cas9 nickase (nCas9).

[0483] In some embodiments, the adenosine deaminase is TadA*7.10. In some embodiments, TadA*7.10 comprises at least one alteration. In particular embodiments, TadA*7.10 comprises one or more of the following alterations: Y147T, Y147R, Q154S, Y123H, V82S, T166R, and Q154R. The alteration Y123H is also referred to herein as H123H (the alteration H123Y in TadA*7.10 reverted back to Y123H (wt)). In other embodiments, the TadA*7.10 comprises a combination of alterations selected from the group of: Y147T+Q154R; Y147T+Q154S; Y147R+Q154S; V82S+Q154S; V82S+Y147R; V82S+Q154R; V82S+Y123H; I76Y+V82S; V82S+Y123H+Y147T; V82S+Y123H+Y147R; V82S+Y123H+Q154R; Y147R+Q154R+Y123H; Y147R+Q154R+I76Y; Y147R+Q154R+T166R; Y123H+Y147R+Q154R+I76Y; V82S+Y123H+Y147R+Q154R; and I76Y+V82S+Y123H+Y147R+Q154R. In particular embodiments, an adenosine deaminase variant comprises a deletion of the C terminus beginning at residue 149, 150, 151, 152, 153, 154, 155, 156, and 157, relative to TadA*7.10, the TadA reference sequence, or a corresponding mutation in another TadA.

[0484] In other embodiments, a base editor of the disclosure is a monomer comprising an adenosine deaminase variant (e.g., TadA*8) comprising one or more of the following alterations: Y147T, Y147R, Q154S, Y123H, V82S, T166R, and/or Q154R, relative to TadA*7.10, the TadA reference sequence, or a corresponding mutation in another TadA. In other embodiments, the adenosine deaminase variant (TadA*8) is a monomer comprising a combination of alterations selected from the group of: Y147T+Q154R; Y147T+Q154S; Y147R+Q154S; V82S+Q154S; V82S+Y147R; V82S+Q154R; V82S+Y123H; I76Y+V82S; V82S+Y123H+Y147T; V82S+Y123H+Y147R; V82S+Y123H+Q154R; Y147R+Q154R+Y123H; Y147R+Q154R+I76Y; Y147R+Q154R+T166R; Y123H+Y147R+Q154R+I76Y; V82S+Y123H+Y147R+Q154R; and I76Y+V82S+Y123H+Y147R+Q154R, relative to TadA*7.10, the TadA reference sequence, or a corresponding mutation in another TadA. In other embodiments, a base editor is a heterodimer comprising a wild-type adenosine deaminase and an adenosine deaminase variant (e.g., TadA*8) comprising one or more of the following alterations Y147T, Y147R, Q154S, Y123H, V82S, T166R, and/or Q154R, relative to TadA*7.10, the TadA reference sequence, or a corresponding mutation in another TadA. In other embodiments, the base editor is a heterodimer comprising a TadA*7.10 domain and an adenosine deaminase variant domain (e.g., TadA*8) comprising a combination of alterations selected from the group of: Y147T+Q154R; Y147T+Q154S; Y147R+Q154S; V82S+Q154S; V82S+Y147R; V82S+Q154R; V82S+Y123H; I76Y+V82S; V82S+Y123H+Y147T; V82S+Y123H+Y147R; V82S+Y123H+Q154R; Y147R+Q154R+Y123H; Y147R+Q154R+I76Y; Y147R+Q154R+T166R; Y123H+Y147R+Q154R+I76Y; V82S+Y123H+Y147R+Q154R; and I76Y+V82S+Y123H+Y147R+Q154R, relative to TadA*7.10, the TadA reference sequence, or a corresponding mutation in another TadA.

[0485] In one embodiment, an adenosine deaminase is a TadA*8 that comprises or consists essentially of the following sequence or a fragment thereof having adenosine deaminase activity:

MSEVEFSHEYWMRHALTLAKRARDEREVPVGAVLVLNNRVIGEGWNR
AIGLHDPTAHAEIMALRQGGLVMQNYRLIDATLYVTFEPCVMCAGAM
IHSRIGRVVFGVRNAKTGAAGSLMDVLHYPGMNHRVEITEGILADEC
AALLCTFFRMPRQVFNAQKKAQSSTD

[0486] In some embodiments, the TadA*8 is a truncated. In some embodiments, the truncated TadA*8 is missing 1, 2, 3, 4, 5, 6, 7, 8, 9, 10, 11, 12, 13, 14, 15, 6, 17, 18, 19, or 20 N-terminal amino acid residues relative to the full length TadA*8. In some embodiments, the truncated TadA*8 is missing 1, 2, 3, 4, 5, 6, 7, 8, 9, 10, 11, 12, 13, 14, 15, 6, 17, 18, 19, or 20 C-terminal amino acid residues relative to the full length TadA*8. In some embodiments the adenosine deaminase variant is a full-length TadA*8.

[0487] In some embodiments the TadA*8 is TadA*8.1, TadA*8.2, TadA*8.3, TadA*8.4, TadA*8.5, TadA*8.6, TadA*8.7, TadA*8.8, TadA*8.9, TadA*8.10, TadA*8.11, TadA*8.12, TadA*8.13, TadA*8.14, TadA*8.15, TadA*8.16, TadA*8.17, TadA*8.18, TadA*8.19, TadA*8.20, TadA*8.21, TadA*8.22, TadA*8.23, or TadA*8.24.

[0488] In one embodiment, a fusion protein of the disclosure comprises a wild-type TadA is linked to an adenosine deaminase variant described herein (e.g., TadA*8), which is linked to Cas9 nickase. In particular embodiments, the fusion proteins comprise a single TadA*8 domain (e.g., provided as a monomer). In other embodiments, the base editor comprises TadA*8 and TadA(wt), which are capable of forming heterodimers. Exemplary sequences follow:

TadA(wt) or “the TadA reference sequence”:
MSEVEFSHEYWMRHALTLAKRAWDEREVPVGAVLVHNNRVIGEGWNR
PIGRHDPTAHAEIMALRQGGLVMQNYRLIDATLYVTLEPCVMCAGAM
IHSRIGRVVFGARDAKTGAAGSLMDVLHHPGMNHRVEITEGILADEC
AALLSDFFRMRRQEIKAQKKAQSSTD
TadA*7.10:
MSEVEFSHEYWMRHALTLAKRARDEREVPVGAVLVLNNRVIGEGWNR
AIGLHDPTAHAEIMALRQGGLVMQNYRLIDATLYVTFEPCVMCAGAM
IHSRIGRVVFGVRNAKTGAAGSLMDVLHYPGMNHRVEITEGILADEC
AALLCYFFRMPRQVFNAQKKAQSSTD
TadA* 8:
MSEVEFSHEYWMRHALTLAKRARDEREVPVGAVLVLNNRVIGEGWNR
AIGLHDPTAHAEIMALRQGGLVMQNYRLIDATLYVTFEPCVMCAGAM
IHSRIGRVVFGVRNAKTGAAGSLMDVLHYPGMNHRVEITEGILADEC
AALLCTFFRMPRQVFNAQKKAQSSTD.

[0489] In some embodiments, the adenosine deaminase comprises an amino acid sequence that is at least 60%, at least 65%, at least 70%, at least 75%, at least 80%, at least 85%, at least 90%, at least 95%, at least 96%, at least 97%, at least 98%, at least 99%, or at least 99.5% identical to any one of the amino acid sequences set forth in any of the adenosine deaminases provided herein. It should be appreciated that adenosine deaminases provided herein may include one or more mutations (e.g., any of the mutations provided herein). The disclosure provides any deaminase domains with a certain percent identity plus any of the mutations or combinations thereof described herein. In some embodiments, the adenosine deaminase comprises an amino acid sequence that has 1, 2, 3, 4, 5, 6, 7, 8, 9, 10, 11, 12, 13, 14, 15, 16, 17, 18, 19, 20, 21, 22, 21, 24, 25, 26, 27, 28, 29, 30, 31, 32, 33, 34, 35, 36, 37, 38, 39, 40, 41, 42, 43, 44, 45, 46, 47, 48, 49, 50, or more mutations compared to a reference sequence, or any of the adenosine deaminases provided herein. In some embodiments, the adenosine deaminase comprises an amino acid sequence that has at least 5, at least 10, at least 15, at least 20, at least 25, at least 30, at least 35, at least 40, at least 45, at least 50, at least 60, at least 70, at least 80, at least 90, at least 100, at least 110, at least 120, at least 130, at least 140, at least 150, at least 160, or at least 170 identical contiguous amino acid residues as compared to any one of the amino acid sequences known in the art or described herein.

[0490] In particular embodiments, a TadA*8 comprises one or more mutations at any of the following positions shown in bold. In other embodiments, a TadA*8 comprises one or more mutations at any of the positions shown with underlining:

| | |
|---|---|
| MSEVEFSHEY WMRHALTLAK RARDEREVPV GAVLVLNNRV IGEGWNRAIG | 50 |
| LHDPTAHAEI MALRQGGLVM QNYRLIDATL Y [symbol] TFEPCVMC AGAMIHSRIG | 100 |
| RVVFGVRNAK TGAAGSLMDV LH [symbol] PGMNHRV EITEGILADE CAALLC [symbol] FFR | 150 |
| MPR [symbol] VFNAQK KAQSS [symbol] D | |

[0491] For example, the TadA*8 comprises alterations at amino acid position 82 and/or 166 (e.g., V82S, T166R) alone or in combination with any one or more of the following Y147T, Y147R, Q154S, Y123H, and/or Q154R, relative to TadA*7.10, the TadA reference sequence, or a corresponding mutation in another TadA. In particular embodiments, a combination of alterations is selected from the group of: Y147T+Q154R; Y147T+Q154S; Y147R+Q154S; V82S+Q154S; V82S+Y147R; V82S+Q154R; V82S+Y123H; I76Y+V82S; V82S+Y123H+Y147T; V82S+Y123H+Y147R; V82S+Y123H+Q154R; Y147R+Q154R+Y123H; Y147R+Q154R+I76Y; Y147R+Q154R+T166R; Y123H+Y147R+Q154R+I76Y; V82S+Y123H+Y147R+Q154R; and I76Y+V82S+Y123H+Y147R+Q154R, relative to TadA*7.10, the TadA reference sequence, or a corresponding mutation in another TadA.

[0492] In some embodiments, the adenosine deaminase is TadA*8, which comprises or consists essentially of the following sequence or a fragment thereof having adenosine deaminase activity:

MSEVEFSHEY WMRHALTLAK RARDEREVPV GAVLVLNNRV
IGEGWNRAIG LHDPTAHAEI MALRQGGLVM QNYRLIDATL
YVTFEPCVMC AGAMIHSRIG RVVFGVRNAK TGAAGSLMDV
LHYPGMNHRV EITEGILADE CAALLCTFFR MPRQVFNAQK
KAQSSTD

[0493] In some embodiments, the TadA*8 is truncated. In some embodiments, the truncated TadA*8 is missing 1, 2, 3, 4, 5, 6, 7, 8, 9, 10, 11, 12, 13, 14, 15, 6, 17, 18, 19, or 20 N-terminal amino acid residues relative to the full length TadA*8. In some embodiments, the truncated TadA*8 is missing 1, 2, 3, 4, 5, 6, 7, 8, 9, 10, 11, 12, 13, 14, 15, 6, 17, 18, 19, or 20 C-terminal amino acid residues relative to the full length TadA*8. In some embodiments the adenosine deaminase variant is a full-length TadA*8.

[0494] In one embodiment, a fusion protein of the disclosure comprises a wild-type TadA is linked to an adenosine deaminase variant described herein (e.g., TadA*8), which is linked to Cas9 nickase. In particular embodiments, the fusion proteins comprise a single TadA*8 domain (e.g., provided as a monomer). In other embodiments, the base editor comprises TadA*8 and TadA(wt), which are capable of forming heterodimers.

### Additional Domains

[0495] A base editor described herein can include any domain which helps to facilitate the nucleobase editing, modification or altering of a nucleobase of a polynucleotide. In some embodiments, a base editor comprises a polynucleotide programmable nucleotide binding domain (e.g., Cas9), a nucleobase editing domain (e.g., deaminase domain), and one or more additional domains. In some embodiments, the additional domain can facilitate enzymatic or catalytic functions of the base editor, binding functions of the base editor, or be inhibitors of cellular machinery (e.g., enzymes) that could interfere with the desired base editing result. In some embodiments, a base editor can comprise a nuclease, a nickase, a recombinase, a deaminase, a methyltransferase, a methylase, an acetylase, an acetyltransferase, a transcriptional activator, or a transcriptional repressor domain.

[0496] In some embodiments, a base editor can comprise an uracil glycosylase inhibitor (UGI) domain. In some embodiments, cellular DNA repair response to the presence of U: G heteroduplex DNA can be responsible for a decrease in nucleobase editing efficiency in cells. In such embodiments, uracil DNA glycosylase (UDG) can catalyze removal of U from DNA in cells, which can initiate base excision repair (BER), mostly resulting in reversion of the U:G pair to a C:G pair. In such embodiments, BER can be inhibited in base editors comprising one or more domains that bind the single strand, block the edited base, inhibit UGI, inhibit BER, protect the edited base, and/or promote repairing of the non-edited strand. Thus, this disclosure contemplates a base editor fusion protein comprising a UGI domain.

[0497] In some embodiments, a base editor comprises as a domain all or a portion of a double-strand break (DSB) binding protein. For example, a DSB binding protein can include a Gam protein of bacteriophage Mu that can bind to the ends of DSBs and can protect them from degradation. See Komor, A. C., et al., “Improved base excision repair inhibition and bacteriophage Mu Gam protein yields C:G-to-T:A base editors with higher efficiency and product purity” Science Advances 3:eaao4774 (2017), the entire content of which is hereby incorporated by reference.

[0498] Additionally, in some embodiments, a Gam protein can be fused to an N terminus of a base editor. In some embodiments, a Gam protein can be fused to a C-terminus of a base editor. The Gam protein of bacteriophage Mu can bind to the ends of double strand breaks (DSBs) and protect them from degradation. In some embodiments, using Gam to bind the free ends of DSB can reduce indel formation during the process of base editing. In some embodiments, 174-residue Gam protein is fused to the N terminus of the base editors. See. Komor, A. C., et al., “Improved base excision repair inhibition and bacteriophage Mu Gam protein yields C:G-to-T:A base editors with higher efficiency and product purity” Science Advances 3:eaao4774 (2017). In some embodiments, a mutation or mutations can change the length of a base editor domain relative to a wild-type domain. For example, a deletion of at least one amino acid in at least one domain can reduce the length of the base editor. In another case, a mutation or mutations do not change the length of a domain relative to a wild-type domain. For example, substitution(s) in any domain does/do not change the length of the base editor.

[0499] In some embodiments, a base editor can comprise as a domain all or a portion of a nucleic acid polymerase (NAP). For example, a base editor can comprise all or a portion of a eukaryotic NAP. In some embodiments, a NAP or portion thereof incorporated into a base editor is a DNA polymerase. In some embodiments, a NAP or portion thereof incorporated into a base editor has translesion polymerase activity. In some embodiments, a NAP or portion thereof incorporated into a base editor is a translesion DNA polymerase. In some embodiments, a NAP or portion thereof incorporated into a base editor is a Rev7, Rev1 complex, polymerase iota, polymerase kappa, or polymerase eta. In some embodiments, a NAP or portion thereof incorporated into a base editor is a eukaryotic polymerase alpha, beta, gamma, delta, epsilon, gamma, eta, iota, kappa, lambda, mu, or nu component. In some embodiments, a NAP or portion thereof incorporated into a base editor comprises an amino acid sequence that is at least 75%, 80%, 85%, 90%, 95%, 96%, 97%, 98%, 99%, or 99.5% identical to a nucleic acid polymerase (e.g., a translesion DNA polymerase).

### Base Editor System

[0500] Use of the base editor system provided herein comprises the steps of: (a) contacting a target nucleotide sequence of a polynucleotide (e.g., double- or single stranded DNA or RNA) of a subject with a base editor system comprising a nucleobase editor (e.g., an adenosine base editor) and a guide polynucleic acid (e.g., gRNA), wherein the target nucleotide sequence comprises a targeted nucleobase pair; (b) inducing strand separation of said target region; (c) converting a first nucleobase of said target nucleobase pair in a single strand of the target region to a second nucleobase; and (d) cutting no more than one strand of said target region, where a third nucleobase complementary to the first nucleobase base is replaced by a fourth nucleobase complementary to the second nucleobase. It should be appreciated that in some embodiments, step (b) is omitted. In some embodiments, said targeted nucleobase pair is a plurality of nucleobase pairs in one or more genes. In some embodiments, the base editor system provided herein is capable of multiplex editing of a plurality of nucleobase pairs in one or more genes. In some embodiments, the plurality of nucleobase pairs is located in the same gene. In some embodiments, the plurality of nucleobase pairs is located in one or more genes, wherein at least one gene is located in a different locus.

[0501] In some embodiments, the cut single strand (nicked strand) is hybridized to the guide nucleic acid. In some embodiments, the cut single strand is opposite to the strand comprising the first nucleobase. In some embodiments, the base editor comprises a Cas9 domain. In some embodiments, the first base is adenine, and the second base is not a G, C, A, or T. In some embodiments, the second base is inosine.

[0502] Base editing system as provided herein provides a new approach to genome editing that uses a fusion protein containing a catalytically defective Streptococcus pyogenes Cas9, an adenosine deaminase, and an inhibitor of base excision repair to induce programmable, single nucleotide (A→G) changes in DNA without generating double-strand DNA breaks, without requiring a donor DNA template, and without inducing an excess of stochastic insertions and deletions.

[0503] Provided herein are systems, compositions, and methods for editing a nucleobase using a base editor system. In some embodiments, the base editor system comprises (1) a base editor (BE) comprising a polynucleotide programmable nucleotide binding domain and a nucleobase editing domain (e.g., a deaminase domain) for editing the nucleobase; and (2) a guide polynucleotide (e.g., guide RNA) in conjunction with the polynucleotide programmable nucleotide binding domain. In some embodiments, the base editor system comprises an adenosine base editor (ABE). In some embodiments, the polynucleotide programmable nucleotide binding domain is a polynucleotide programmable DNA binding domain. In some embodiments, the polynucleotide programmable nucleotide binding domain is a polynucleotide programmable RNA binding domain. In some embodiments, the nucleobase editing domain is a deaminase domain. In some embodiments, a deaminase domain can be an adenine deaminase or an adenosine deaminase.

[0504] In some embodiments, the adenosine base editor can deaminate adenine in DNA. In some embodiments, ABE comprises an evolved TadA variant.

[0505] Details of nucleobase editing proteins are described in International PCT Application Nos. PCT/2017/045381 (WO2018/027078) and PCT/US2016/058344 (WO2017/070632), each of which is incorporated herein by reference for its entirety. Also see Komor, A. C., et al., “Programmable editing of a target base in genomic DNA without double-stranded DNA cleavage” Nature 533, 420-424 (2016); Gaudelli, N. M., et al., “Programmable base editing of A⋅T to G⋅C in genomic DNA without DNA cleavage” Nature 551, 464-471 (2017); and Komor, A. C., et al., “Improved base excision repair inhibition and bacteriophage Mu Gam protein yields C:G-to-T:A base editors with higher efficiency and product purity” Science Advances 3:eaao4774 (2017), the entire contents of which are hereby incorporated by reference.

[0506] In some embodiments, a single guide polynucleotide may be utilized to target a deaminase to a target nucleic acid sequence. In some embodiments, a single pair of guide polynucleotides may be utilized to target different deaminases to a target nucleic acid sequence.

[0507] The nucleobase components and the polynucleotide programmable nucleotide binding component of a base editor system may be associated with each other covalently or non-covalently. For example, in some embodiments, the deaminase domain can be targeted to a target nucleotide sequence by a polynucleotide programmable nucleotide binding domain. In some embodiments, a polynucleotide programmable nucleotide binding domain can be fused or linked to a deaminase domain. In some embodiments, a polynucleotide programmable nucleotide binding domain can target a deaminase domain to a target nucleotide sequence by non-covalently interacting with or associating with the deaminase domain. For example, in some embodiments, the nucleobase editing component, e.g., the deaminase component can comprise an additional heterologous portion or domain that is capable of interacting with, associating with, or capable of forming a complex with an additional heterologous portion or domain that is part of a polynucleotide programmable nucleotide binding domain. In some embodiments, the additional heterologous portion may be capable of binding to, interacting with, associating with, or forming a complex with a polypeptide. In some embodiments, the additional heterologous portion may be capable of binding to, interacting with, associating with, or forming a complex with a polynucleotide. In some embodiments, the additional heterologous portion may be capable of binding to a guide polynucleotide. In some embodiments, the additional heterologous portion may be capable of binding to a polypeptide linker. In some embodiments, the additional heterologous portion may be capable of binding to a polynucleotide linker. The additional heterologous portion may be a protein domain. In some embodiments, the additional heterologous portion may be a K Homology (KH) domain, a MS2 coat protein domain, a PP7 coat protein domain, a SfMu Com coat protein domain, a steril alpha motif, a telomerase Ku binding motif and Ku protein, a telomerase Sm7 binding motif and Sm7 protein, or a RNA recognition motif.

[0508] A base editor system may further comprise a guide polynucleotide component. It should be appreciated that components of the base editor system may be associated with each other via covalent bonds, noncovalent interactions, or any combination of associations and interactions thereof. In some embodiments, a deaminase domain can be targeted to a target nucleotide sequence by a guide polynucleotide. For example, in some embodiments, the nucleobase editing component of the base editor system, e.g., the deaminase component, can comprise an additional heterologous portion or domain (e.g., polynucleotide binding domain such as an RNA or DNA binding protein) that is capable of interacting with, associating with, or capable of forming a complex with a portion or segment (e.g., a polynucleotide motif) of a guide polynucleotide. In some embodiments, the additional heterologous portion or domain (e.g., polynucleotide binding domain such as an RNA or DNA binding protein) can be fused or linked to the deaminase domain. In some embodiments, the additional heterologous portion may be capable of binding to, interacting with, associating with, or forming a complex with a polypeptide. In some embodiments, the additional heterologous portion may be capable of binding to, interacting with, associating with, or forming a complex with a polynucleotide. In some embodiments, the additional heterologous portion may be capable of binding to a guide polynucleotide. In some embodiments, the additional heterologous portion may be capable of binding to a polypeptide linker. In some embodiments, the additional heterologous portion may be capable of binding to a polynucleotide linker. The additional heterologous portion may be a protein domain. In some embodiments, the additional heterologous portion may be a K Homology (KH) domain, a MS2 coat protein domain, a PP7 coat protein domain, a SfMu Com coat protein domain, a sterile alpha motif, a telomerase Ku binding motif and Ku protein, a telomerase Sm7 binding motif and Sm7 protein, or a RNA recognition motif.

[0509] In some embodiments, a base editor system can further comprise an inhibitor of base excision repair (BER) component. It should be appreciated that components of the base editor system may be associated with each other via covalent bonds, noncovalent interactions, or any combination of associations and interactions thereof. The inhibitor of BER component may comprise a base excision repair inhibitor. In some embodiments, the inhibitor of base excision repair can be a uracil DNA glycosylase inhibitor (UGI). In some embodiments, the inhibitor of base excision repair can be an inosine base excision repair inhibitor. In some embodiments, the inhibitor of base excision repair can be targeted to the target nucleotide sequence by the polynucleotide programmable nucleotide binding domain. In some embodiments, a polynucleotide programmable nucleotide binding domain can be fused or linked to an inhibitor of base excision repair. In some embodiments, a polynucleotide programmable nucleotide binding domain can be fused or linked to a deaminase domain and an inhibitor of base excision repair. In some embodiments, a polynucleotide programmable nucleotide binding domain can target an inhibitor of base excision repair to a target nucleotide sequence by non-covalently interacting with or associating with the inhibitor of base excision repair. For example, in some embodiments, the inhibitor of base excision repair component can comprise an additional heterologous portion or domain that is capable of interacting with, associating with, or capable of forming a complex with an additional heterologous portion or domain that is part of a polynucleotide programmable nucleotide binding domain. In some embodiments, the inhibitor of base excision repair can be targeted to the target nucleotide sequence by the guide polynucleotide. For example, in some embodiments, the inhibitor of base excision repair can comprise an additional heterologous portion or domain (e.g., polynucleotide binding domain such as an RNA or DNA binding protein) that is capable of interacting with, associating with, or capable of forming a complex with a portion or segment (e.g., a polynucleotide motif) of a guide polynucleotide. In some embodiments, the additional heterologous portion or domain of the guide polynucleotide (e.g., polynucleotide binding domain such as an RNA or DNA binding protein) can be fused or linked to the inhibitor of base excision repair. In some embodiments, the additional heterologous portion may be capable of binding to, interacting with, associating with, or forming a complex with a polynucleotide. In some embodiments, the additional heterologous portion may be capable of binding to a guide polynucleotide. In some embodiments, the additional heterologous portion may be capable of binding to a polypeptide linker. In some embodiments, the additional heterologous portion may be capable of binding to a polynucleotide linker. The additional heterologous portion may be a protein domain. In some embodiments, the additional heterologous portion may be a K Homology (KH) domain, a MS2 coat protein domain, a PP7 coat protein domain, a SfMu Com coat protein domain, a sterile alpha motif, a telomerase Ku binding motif and Ku protein, a telomerase Sm7 binding motif and Sm7 protein, or a RNA recognition motif.

[0510] In some embodiments, the base editor inhibits base excision repair (BER) of the edited strand. In some embodiments, the base editor protects or binds the non-edited strand. In some embodiments, the base editor comprises UGI activity. In some embodiments, the base editor comprises a catalytically inactive inosine-specific nuclease. In some embodiments, the base editor comprises nickase activity. In some embodiments, the intended edit of base pair is upstream of a PAM site. In some embodiments, the intended edit of base pair is 1, 2, 3, 4, 5, 6, 7, 8, 9, 10, 11, 12, 13, 14, 15, 16, 17, 18, 19, or 20 nucleotides upstream of the PAM site. In some embodiments, the intended edit of base-pair is downstream of a PAM site. In some embodiments, the intended edited base pair is 1, 2, 3, 4, 5, 6, 7, 8, 9, 10, 11, 12, 13, 14, 15, 16, 17, 18, 19, or 20 nucleotides downstream stream of the PAM site.

[0511] In some embodiments, the method does not require a canonical (e.g., NGG) PAM site. In some embodiments, the nucleobase editor comprises a linker or a spacer. In some embodiments, the linker or spacer is 1-25 amino acids in length. In some embodiments, the linker or spacer is 5-20 amino acids in length. In some embodiments, the linker or spacer is 10, 11, 12, 13, 14, 15, 16, 17, 18, 19, or 20 amino acids in length.

[0512] In some embodiments, the base editing fusion proteins provided herein need to be positioned at a precise location, for example, where a target base is placed within a defined region (e.g., a “deamination window”). In some embodiments, a target can be within a 4 base region. In some embodiments, such a defined target region can be approximately 15 bases upstream of the PAM. See Komor, A. C., et al., “Programmable editing of a target base in genomic DNA without double-stranded DNA cleavage” Nature 533, 420-424 (2016); Gaudelli, N. M., et al., “Programmable base editing of A⋅T to G⋅C in genomic DNA without DNA cleavage” Nature 551, 464-471 (2017); and Komor, A. C., et al., “Improved base excision repair inhibition and bacteriophage Mu Gam protein yields C:G-to-T:A base editors with higher efficiency and product purity” Science Advances 3:eaao4774 (2017), the entire contents of which are hereby incorporated by reference.

[0513] In some embodiments, the target region comprises a target window, wherein the target window comprises the target nucleobase pair. In some embodiments, the target window comprises 1-10 nucleotides. In some embodiments, the target window is 1, 2, 3, 4, 5, 6, 7, 8, 9, 10, 11, 12, 13, 14, 15, 16, 17, 18, 19, or 20 nucleotides in length. In some embodiments, the intended edit of base pair is within the target window. In some embodiments, the target window comprises the intended edit of base pair. In some embodiments, the method is performed using any of the base editors provided herein. In some embodiments, a target window is a deamination window. A deamination window can be the defined region in which a base editor acts upon and deaminates a target nucleotide. In some embodiments, the deamination window is within a 2, 3, 4, 5, 6, 7, 8, 9, or 10 base regions. In some embodiments, the deamination window is 5, 6, 7, 8, 9, 10, 11, 12, 13, 14, 15, 16, 17, 18, 19, 20, 21, 22, 23, 24, or 25 bases upstream of the PAM.

[0514] The base editors of the present disclosure can comprise any domain, feature or amino acid sequence which facilitates the editing of a target polynucleotide sequence. For example, in some embodiments, the base editor comprises a nuclear localization sequence (NLS). In some embodiments, an NLS of the base editor is localized between a deaminase domain and a polynucleotide programmable nucleotide binding domain. In some embodiments, an NLS of the base editor is localized C-terminal to a polynucleotide programmable nucleotide binding domain.

[0515] Other exemplary features that can be present in a base editor as disclosed herein are localization sequences, such as cytoplasmic localization sequences, export sequences, such as nuclear export sequences, or other localization sequences, as well as sequence tags that are useful for solubilization, purification, or detection of the fusion proteins. Suitable protein tags provided herein include, but are not limited to, biotin carboxylase carrier protein (BCCP) tags, myc-tags, calmodulin-tags, FLAG-tags, hemagglutinin (HA)-tags, polyhistidine tags, also referred to as histidine tags or His-tags, maltose binding protein (MBP)-tags, nus-tags, glutathione-S-transferase (GST)-tags, green fluorescent protein (GFP)-tags, thioredoxin-tags, S-tags, Softags (e.g., Softag 1, Softag 3), strep-tags, biotin ligase tags, FlAsH tags, V5 tags, and SBP-tags. Additional suitable sequences will be apparent to those of skill in the art. In some embodiments, the fusion protein comprises one or more His tags.

[0516] Non-limiting examples of protein domains which can be included in the fusion protein include deaminase domains (e.g., adenosine deaminase), a uracil glycosylase inhibitor (UGI) domain, epitope tags, and reporter gene sequences.

[0517] Non-limiting examples of epitope tags include histidine (His) tags, V5 tags, FLAG tags, influenza hemagglutinin (HA) tags, Myc tags, VSV-G tags, and thioredoxin (Trx) tags. Examples of reporter genes include, but are not limited to, glutathione-5-transferase (GST), horseradish peroxidase (HRP), chloramphenicol acetyltransferase (CAT) beta-galactosidase, beta-glucuronidase, luciferase, green fluorescent protein (GFP), HcRed, DsRed, cyan fluorescent protein (CFP), yellow fluorescent protein (YFP), and autofluorescent proteins including blue fluorescent protein (BFP). Additional protein sequences can include amino acid sequences that bind DNA molecules or bind other cellular molecules, including, but not limited to, maltose binding protein (MBP), S-tag, Lex A DNA binding domain (DBD) fusions, GAL4 DNA binding domain fusions, and herpes simplex virus (HSV) BP16 protein fusions.

[0518] In some embodiments, the adenosine base editor (ABE) can deaminate adenine in DNA. In some embodiments, ABE is generated by replacing APOBEC1 component of BE3 with natural or engineered E. coli TadA, human ADAR2, mouse ADA, or human ADAT2. In some embodiments, ABE comprises evolved TadA variant. In some embodiments, the ABE is ABE 1.2 (TadA*-XTEN-nCas9-NLS). In some embodiments, TadA* comprises A106V and D108N mutations.

[0519] In some embodiments, the ABE is a second-generation ABE. In some embodiments, the ABE is ABE2.1, which comprises additional mutations D147Y and E155V in TadA* (TadA*2.1). In some embodiments, the ABE is ABE2.2, ABE2.1 fused to catalytically inactivated version of human alkyl adenine DNA glycosylase (AAG with E125Q mutation). In some embodiments, the ABE is ABE2.3, ABE2.1 fused to catalytically inactivated version of E. coli Endo V (inactivated with D35A mutation). In some embodiments, the ABE is ABE2.6 which has a linker twice as long (32 amino acids, (SGGS)₂-XTEN-(SGGS)₂) as the linker in ABE2.1. In some embodiments, the ABE is ABE2.7, which is ABE2.1 tethered with an additional wild-type TadA monomer. In some embodiments, the ABE is ABE2.8, which is ABE2.1 tethered with an additional TadA*2.1 monomer. In some embodiments, the ABE is ABE2.9, which is a direct fusion of evolved TadA (TadA*2.1) to the N-terminus of ABE2.1. In some embodiments, the ABE is ABE2.10, which is a direct fusion of wild-type TadA to the N-terminus of ABE2.1. In some embodiments, the ABE is ABE2.11, which is ABE2.9 with an inactivating E59A mutation at the N-terminus of TadA* monomer. In some embodiments, the ABE is ABE2.12, which is ABE2.9 with an inactivating E59A mutation in the internal TadA* monomer.

[0520] In some embodiments, the ABE is a third generation ABE. In some embodiments, the ABE is ABE3.1, which is ABE2.3 with three additional TadA mutations (L84F, H123Y, and I156F).

[0521] In some embodiments, the ABE is a fourth generation ABE. In some embodiments, the ABE is ABE4.3, which is ABE3.1 with an additional TadA mutation A142N (TadA*4.3).

[0522] In some embodiments, the ABE is a fifth generation ABE. In some embodiments, the ABE is ABE5.1, which is generated by importing a consensus set of mutations from surviving clones (H36L, R51L, S146C, and K157N) into ABE3.1. In some embodiments, the ABE is ABE5.3, which has a heterodimeric construct containing wild-type E. coli TadA fused to an internal evolved TadA*. In some embodiments, the ABE is ABE5.2, ABE5.4, ABE5.5, ABE5.6, ABE5.7, ABE5.8, ABE5.9, ABE5.10, ABE5.11, ABE5.12, ABE5.13, or ABE5.14, as shown in Table 8 below. In some embodiments, the ABE is a sixth generation ABE. In some embodiments, the ABE is ABE6.1, ABE6.2, ABE6.3, ABE6.4, ABE6.5, or ABE6.6, as shown in Table 8 below. In some embodiments, the ABE is a seventh generation ABE. In some embodiments, the ABE is ABE7.1, ABE7.2, ABE7.3, ABE7.4, ABE7.5, ABE7.6, ABE7.7, ABE7.8, ABE 7.9, or ABE7.10, as shown in Table 8 below.

TABLE 8
Genotypes of ABEs

| | 23 | 26 | 36 | 37 | 48 | 49 | 51 | 72 | 84 | 87 | 106 | 108 | 123 | 125 | 142 | 146 | 147 | 152 | 155 | 156 | 157 | 161 |
|---|---|---|---|---|---|---|---|---|---|---|---|---|---|---|---|---|---|---|---|---|---|---|
| ABE0.1 | W | R | H | N | P | | R | N | L | S | A | D | H | G | A | S | D | R | E | I | K | K |
| ABE0.2 | W | R | H | N | P | | R | N | L | S | A | D | H | G | A | S | D | R | E | I | K | K |
| ABE1.1 | W | R | H | N | P | | R | N | L | S | A | N | H | G | A | S | D | R | E | I | K | K |
| ABE1.2 | W | R | H | N | P | | R | N | L | S | V | N | H | G | A | S | D | R | E | I | K | K |
| ABE2.1 | W | R | H | N | P | | R | N | L | S | V | N | H | G | A | S | Y | R | V | I | K | K |
| ABE2.2 | W | R | H | N | P | | R | N | L | S | V | N | H | G | A | S | Y | R | V | I | K | K |
| ABE2.3 | W | R | H | N | P | | R | N | L | S | V | N | H | G | A | S | Y | R | V | I | K | K |
| ABE2.4 | W | R | H | N | P | | R | N | L | S | V | N | H | G | A | S | Y | R | V | I | K | K |
| ABE2.5 | W | R | H | N | P | | R | N | L | s | V | N | H | G | A | S | Y | R | V | I | K | K |
| ABE2.6 | W | R | H | N | P | | R | N | L | S | V | N | H | G | A | S | Y | R | V | I | K | K |
| ABE2.7 | W | R | H | N | P | | R | N | L | S | V | N | H | G | A | S | Y | R | V | I | K | K |
| ABE2.8 | W | R | H | N | P | | R | N | L | S | V | N | H | G | A | S | Y | R | V | I | K | K |
| ABE2.9 | W | R | H | N | P | | R | N | L | S | V | N | H | G | A | S | Y | R | V | I | K | K |
| ABE2.10 | W | R | H | N | P | | R | N | L | S | V | N | H | G | A | S | Y | R | V | I | K | K |
| ABE2.11 | W | R | H | N | P | | R | N | L | S | V | N | H | G | A | S | Y | R | V | I | K | K |
| ABE2.12 | W | R | H | N | P | | R | N | L | S | V | N | H | G | A | S | Y | R | V | I | K | K |
| ABE3.1 | W | R | H | N | P | | R | N | F | S | V | N | Y | G | A | S | Y | R | V | F | K | K |
| ABE3.2 | W | R | H | N | P | | R | N | F | S | V | N | Y | G | A | S | Y | R | V | F | K | K |
| ABE3.3 | W | R | H | N | P | | R | N | F | S | V | N | Y | G | A | S | Y | R | V | F | K | K |
| ABE3.4 | W | R | H | N | P | | R | N | F | S | V | N | Y | G | A | S | Y | R | V | F | K | K |
| ABE3.5 | W | R | H | N | P | | R | N | F | S | V | N | Y | G | A | S | Y | R | V | F | K | K |
| ABE3.6 | W | R | H | N | P | | R | N | F | S | V | N | Y | G | A | S | Y | R | V | F | K | K |
| ABE3.7 | W | R | H | N | P | | R | N | F | S | V | N | Y | G | A | S | Y | R | V | F | K | K |
| ABE3.8 | W | R | H | N | P | | R | N | F | S | V | N | Y | G | A | S | Y | R | V | F | K | K |
| ABE4.1 | W | R | H | N | P | | R | N | L | S | V | N | H | G | N | S | Y | R | V | I | K | K |
| ABE4.2 | W | G | H | N | P | | R | N | L | S | V | N | H | G | N | S | Y | R | V | I | K | K |
| ABE4.3 | W | R | H | N | P | | R | N | F | S | V | N | Y | G | N | S | Y | R | V | F | K | K |
| ABE5.1 | W | R | L | N | P | | L | N | F | S | V | N | Y | G | A | C | Y | R | V | F | N | K |
| ABE5.2 | W | R | H | S | P | | R | N | F | S | V | N | Y | G | A | S | Y | R | V | F | K | T |
| ABE5.3 | W | R | L | N | P | | L | N | I | S | V | N | Y | G | A | C | Y | R | V | F | N | K |
| ABE5.4 | W | R | H | S | P | | R | N | F | S | V | N | Y | G | A | S | Y | R | V | F | K | T |
| ABE5.5 | W | R | L | N | P | | L | N | F | S | v | N | Y | G | A | C | Y | R | V | F | N | K |
| ABE5.6 | W | R | L | N | P | | L | N | F | S | V | N | Y | G | A | C | Y | R | V | F | N | K |
| ABE5.7 | W | R | L | N | P | | L | N | F | S | V | N | Y | G | A | C | Y | R | V | F | N | K |
| ABE5.8 | W | R | L | N | P | | L | N | F | S | V | N | Y | G | A | C | Y | R | V | F | N | K |
| ABE5.9 | W | R | L | N | P | | L | N | F | S | V | N | Y | G | A | C | Y | R | V | F | N | K |
| ABE5.10 | W | R | L | N | P | | L | N | F | S | V | N | Y | G | A | C | Y | R | V | F | N | K |
| ABE5.11 | W | R | L | N | P | | L | N | F | S | V | N | Y | G | A | C | Y | R | V | F | N | K |
| ABE5.12 | W | R | L | N | P | | L | N | F | S | V | N | Y | G | A | C | Y | R | V | F | N | K |
| ABE5.13 | W | R | H | N | P | | L | D | F | S | V | N | Y | A | A | S | Y | R | V | F | K | K |
| ABE5.14 | W | R | H | N | S | | L | N | F | C | V | N | Y | G | A | S | Y | R | V | F | K | K |
| ABE6.1 | W | R | H | N | S | | L | N | F | S | V | N | Y | G | N | S | Y | R | V | F | K | K |
| ABE6.2 | W | R | H | N | T | V | L | N | F | S | V | N | Y | G | N | S | Y | R | V | F | N | K |
| ABE6.3 | W | R | L | N | S | | L | N | F | S | V | N | Y | G | A | C | Y | R | V | F | N | K |
| ABE6.4 | W | R | L | N | S | | L | N | F | S | V | N | Y | G | N | C | Y | R | V | F | N | K |
| ABE6.5 | W | R | L | N | T | V | L | N | F | S | V | N | Y | G | A | C | Y | R | V | F | N | K |
| ABE6.6 | W | R | L | N | T | V | L | N | F | S | V | N | Y | G | N | C | Y | R | V | F | N | K |
| ABE7.1 | W | R | L | N | A | | L | N | F | S | V | N | Y | G | A | C | Y | R | V | F | N | K |
| ABE7.2 | W | R | L | N | A | | L | N | F | S | V | N | Y | G | N | C | Y | R | V | F | N | K |
| ABE7.3 | L | R | L | N | A | | L | N | F | S | V | N | Y | G | A | C | Y | R | V | F | N | K |
| ABE7.4 | R | R | L | N | A | | L | N | F | S | V | N | Y | G | A | C | Y | R | V | F | N | K |
| ABE7.5 | W | R | L | N | A | | L | N | F | S | V | N | Y | G | A | C | Y | H | V | F | N | K |
| ABE7.6 | W | R | L | N | A | | L | N | I | S | V | N | Y | G | A | C | Y | P | V | F | N | K |
| ABE7.7 | L | R | L | N | A | | L | N | F | S | V | N | Y | G | A | C | Y | P | V | F | N | K |
| ABE7.8 | L | R | L | N | A | | L | N | F | S | V | N | Y | G | N | C | Y | R | V | F | N | K |
| ABE7.9 | L | R | L | N | A | | L | N | F | S | V | N | Y | G | N | C | Y | P | V | F | N | K |
| ABE7.10 | R | R | L | N | A | | L | N | F | S | V | N | Y | G | A | C | Y | P | V | F | N | K |

[0523] In some embodiments, the base editor is an eighth generation ABE (ABE8). In some embodiments, the ABE8 contains a TadA*8 variant. In some embodiments, the ABE8 has a monomeric construct containing a TadA*8 variant (“ABE8.x-m”). In some embodiments, the ABE8 is ABE8.1-m, which has a monomeric construct containing TadA*7.10 with a Y147T mutation (TadA*8.1). In some embodiments, the ABE8 is ABE8.2-m, which has a monomeric construct containing TadA*7.10 with a Y147R mutation (TadA*8.2). In some embodiments, the ABE8 is ABE8.3-m, which has a monomeric construct containing TadA*7.10 with a Q154S mutation (TadA*8.3). In some embodiments, the ABE8 is ABE8.4-m, which has a monomeric construct containing TadA*7.10 with a Y123H mutation (TadA*8.4). In some embodiments, the ABE8 is ABE8.5-m, which has a monomeric construct containing TadA*7.10 with a V82S mutation (TadA*8.5). In some embodiments, the ABE8 is ABE8.6-m, which has a monomeric construct containing TadA*7.10 with a T166R mutation (TadA*8.6). In some embodiments, the ABE8 is ABE8.7-m, which has a monomeric construct containing TadA*7.10 with a Q154R mutation (TadA*8.7). In some embodiments, the ABE8 is ABE8.8-m, which has a monomeric construct containing TadA*7.10 with Y147R, Q154R, and Y123H mutations (TadA*8.8). In some embodiments, the ABE8 is ABE8.9-m, which has a monomeric construct containing TadA*7.10 with Y147R, Q154R and I76Y mutations (TadA*8.9). In some embodiments, the ABE8 is ABE8.10-m, which has a monomeric construct containing TadA*7.10 with Y147R, Q154R, and T166R mutations (TadA*8.10). In some embodiments, the ABE8 is ABE8.11-m, which has a monomeric construct containing TadA*7.10 with Y147T and Q154R mutations (TadA*8.11). In some embodiments, the ABE8 is ABE8.12-m, which has a monomeric construct containing TadA*7.10 with Y147T and Q154S mutations (TadA*8.12). In some embodiments, the ABE8 is ABE8.13-m, which has a monomeric construct containing TadA*7.10 with Y123H (Y123H reverted from H123Y), Y147R, Q154R and I76Y mutations (TadA*8.13). In some embodiments, the ABE8 is ABE8.14-m, which has a monomeric construct containing TadA*7.10 with I76Y and V82S mutations (TadA*8.14). In some embodiments, the ABE8 is ABE8.15-m, which has a monomeric construct containing TadA*7.10 with V82S and Y147R mutations (TadA*8.15). In some embodiments, the ABE8 is ABE8.16-m, which has a monomeric construct containing TadA*7.10 with V82S, Y123H (Y123H reverted from H123Y) and Y147R mutations (TadA*8.16). In some embodiments, the ABE8 is ABE8.17-m, which has a monomeric construct containing TadA*7.10 with V82S and Q154R mutations (TadA*8.17). In some embodiments, the ABE8 is ABE8.18-m, which has a monomeric construct containing TadA*7.10 with V82S, Y123H (Y123H reverted from H123Y) and Q154R mutations (TadA*8.18). In some embodiments, the ABE8 is ABE8.19-m, which has a monomeric construct containing TadA*7.10 with V82S, Y123H (Y123H reverted from H123Y), Y147R and Q154R mutations (TadA*8.19). In some embodiments, the ABE8 is ABE8.20-m, which has a monomeric construct containing TadA*7.10 with I76Y, V82S, Y123H (Y123H reverted from H123Y), Y147R and Q154R mutations (TadA*8.20). In some embodiments, the ABE8 is ABE8.21-m, which has a monomeric construct containing TadA*7.10 with Y147R and Q154S mutations (TadA*8.21). In some embodiments, the ABE8 is ABE8.22-m, which has a monomeric construct containing TadA*7.10 with V82S and Q154S mutations (TadA*8.22). In some embodiments, the ABE8 is ABE8.23-m, which has a monomeric construct containing TadA*7.10 with V82S and Y123H (Y123H reverted from H123Y) mutations (TadA*8.23). In some embodiments, the ABE8 is ABE8.24-m, which has a monomeric construct containing TadA*7.10 with V82S, Y123H (Y123H reverted from H123Y), and Y147T mutations (TadA*8.24).

[0524] In some embodiments, the ABE8 has a heterodimeric construct containing wild-type E. coli TadA fused to a TadA*8 variant (“ABE8.x-d”). In some embodiments, the ABE8 is ABE8.1-d, which has a heterodimeric construct containing wild-type E. coli TadA fused to TadA*7.10 with a Y147T mutation (TadA*8.1). In some embodiments, the ABE8 is ABE8.2-d, which has a heterodimeric construct containing wild-type E. coli TadA fused to TadA*7.10 with a Y147R mutation (TadA*8.2). In some embodiments, the ABE8 is ABE8.3-d, which has a heterodimeric construct containing wild-type E. coli TadA fused to TadA*7.10 with a Q154S mutation (TadA*8.3). In some embodiments, the ABE8 is ABE8.4-d, which has a heterodimeric construct containing wild-type E. coli TadA fused to TadA*7.10 with a Y123H mutation (TadA*8.4). In some embodiments, the ABE8 is ABE8.5-d, which has a heterodimeric construct containing wild-type E. coli TadA fused to TadA*7.10 with a V82S mutation (TadA*8.5). In some embodiments, the ABE8 is ABE8.6-d, which has a heterodimeric construct containing wild-type E. coli TadA fused to TadA*7.10 with a T166R mutation (TadA*8.6). In some embodiments, the ABE8 is ABE8.?-d, which has a heterodimeric construct containing wild-type E. coli TadA fused to TadA*7.10 with a Q154R mutation (TadA*8.7). In some embodiments, the ABE8 is ABE8.8-d, which has a heterodimeric construct containing wild-type E. coli TadA fused to TadA*7.10 with Y147R, Q154R, and Y123H mutations (TadA*8.8). In some embodiments, the ABE8 is ABE8.9-d, which has a heterodimeric construct containing wild-type E. coli TadA fused to TadA*7.10 with Y147R, Q154R and I76Y mutations (TadA*8.9). In some embodiments, the ABE8 is ABE8.10-d, which has a heterodimeric construct containing wild-type E. coli TadA fused to TadA*7.10 with Y147R, Q154R, and T166R mutations (TadA*8.10). In some embodiments, the ABE8 is ABE8.11-d, which has a heterodimeric construct containing wild-type E. coli TadA fused to TadA*7.10 with Y147T and Q154R mutations (TadA*8.11). In some embodiments, the ABE8 is ABE8.12-d, which has heterodimeric construct containing wild-type E. coli TadA fused to TadA*7.10 with Y147T and Q154S mutations (TadA*8.12). In some embodiments, the ABE8 is ABE8.13-d, which has a heterodimeric construct containing wild-type E. coli TadA fused to TadA*7.10 with Y123H (Y123H reverted from H123Y), Y147R, Q154R and I76Y mutations (TadA*8.13). In some embodiments, the ABE8 is ABE8.14-d, which has a heterodimeric construct containing wild-type E. coli TadA fused to TadA*7.10 with I76Y and V82S mutations (TadA*8.14). In some embodiments, the ABE8 is ABE8.15-d, which has a heterodimeric construct containing wild-type E. coli TadA fused to TadA*7.10 with V82S and Y147R mutations (TadA*8.15). In some embodiments, the ABE8 is ABE8.16-d, which has a heterodimeric construct containing wild-type E. coli TadA fused to TadA*7.10 with V82S, Y123H (Y123H reverted from H123Y) and Y147R mutations (TadA*8.16). In some embodiments, the ABE8 is ABE8.17-d, which has a heterodimeric construct containing wild-type E. coli TadA fused to TadA*7.10 with V82S and Q154R mutations (TadA*8.17). In some embodiments, the ABE8 is ABE8.18-d, which has a heterodimeric construct containing wild-type E. coli TadA fused to TadA*7.10 with V82S, Y123H (Y123H reverted from H123Y) and Q154R mutations (TadA*8.18). In some embodiments, the ABE8 is ABE8.19-d, which has a heterodimeric construct containing wild-type E. coli TadA fused to TadA*7.10 with V82S, Y123H (Y123H reverted from H123Y), Y147R and Q154R mutations (TadA*8.19). In some embodiments, the ABE8 is ABE8.20-d, which has a heterodimeric construct containing wild-type E. coli TadA fused to TadA*7.10 with I76Y, V82S, Y123H (Y123H reverted from H123Y), Y147R and Q154R mutations (TadA*8.20). In some embodiments, the ABE8 is ABE8.21-d, which has a heterodimeric construct containing wild-type E. coli TadA fused to TadA*7.10 with Y147R and Q154S mutations (TadA*8.21). In some embodiments, the ABE8 is ABE8.22-d, which has a heterodimeric construct containing wild-type E. coli TadA fused to TadA*7.10 with V82S and Q154S mutations (TadA*8.22). In some embodiments, the ABE8 is ABE8.23-d, which has a heterodimeric construct containing wild-type E. coli TadA fused to TadA*7.10 with V82S and Y123H (Y123H reverted from H123Y) mutations (TadA*8.23). In some embodiments, the ABE8 is ABE8.24-d, which has a heterodimeric construct containing wild-type E. coli TadA fused to TadA*7.10 with V82S, Y123H (Y123H reverted from H123Y), and Y147T mutations (TadA*8.24).

[0525] In some embodiments, the ABE8 has a heterodimeric construct containing TadA*7.10 fused to a TadA*8 variant (“ABE8.x-7”). In some embodiments, the ABE8 is ABE8.1-7, which has a heterodimeric construct containing TadA*7.10 fused to TadA*7.10 with a Y147T mutation (TadA*8.1). In some embodiments, the ABE8 is ABE8.2-7, which has a heterodimeric construct containing TadA*7.10 fused to TadA*7.10 with a Y147R mutation (TadA*8.2). In some embodiments, the ABE8 is ABE8.3-7, which has a heterodimeric construct containing TadA*7.10 fused to TadA*7.10 with a Q154S mutation (TadA*8.3). In some embodiments, the ABE8 is ABE8.4-7, which has a heterodimeric construct containing TadA*7.10 fused to TadA*7.10 with a Y123H mutation (TadA*8.4). In some embodiments, the ABE8 is ABE8.5-7, which has a heterodimeric construct containing TadA*7.10 fused to TadA*7.10 with a V82S mutation (TadA*8.5). In some embodiments, the ABE8 is ABE8.6-7, which has a heterodimeric construct containing TadA*7.10 fused to TadA*7.10 with a T166R mutation (TadA*8.6). In some embodiments, the ABE8 is ABE8.?-7, which has a heterodimeric construct containing TadA*7.10 fused to TadA*7.10 with a Q154R mutation (TadA*8.7). In some embodiments, the ABE8 is ABE8.8-7, which has a heterodimeric construct containing TadA*7.10 fused to TadA*7.10 with Y147R, Q154R, and Y123H mutations (TadA*8.8). In some embodiments, the ABE8 is ABE8.9-7, which has a heterodimeric construct containing TadA*7.10 fused to TadA*7.10 with Y147R, Q154R and I76Y mutations (TadA*8.9). In some embodiments, the ABE8 is ABE8.10-7, which has a heterodimeric construct containing TadA*7.10 fused to TadA*7.10 with Y147R, Q154R, and T166R mutations (TadA*8.10). In some embodiments, the ABE8 is ABE8.11-7, which has a heterodimeric construct containing TadA*7.10 fused to TadA*7.10 with Y147T and Q154R mutations (TadA*8.11). In some embodiments, the ABE8 is ABE8.12-7, which has a heterodimeric construct containing TadA*7.10 fused to TadA*7.10 with Y147T and Q154S mutations (TadA*8.12). In some embodiments, the ABE8 is ABE8.13-7, which has a heterodimeric construct containing TadA*7.10 fused to TadA*7.10 with Y123H (Y123H reverted from H123Y), Y147R, Q154R and I76Y mutations (TadA*8.13). In some embodiments, the ABE8 is ABE8.14-7, which has a heterodimeric construct containing TadA*7.10 fused to TadA*7.10 with I76Y and V82S mutations (TadA*8.14). In some embodiments, the ABE8 is ABE8.15-7, which has a heterodimeric construct containing TadA*7.10 fused to TadA*7.10 with V82S and Y147R mutations (TadA*8.15). In some embodiments, the ABE8 is ABE8.16-7, which has a heterodimeric construct containing TadA*7.10 fused to TadA*7.10 with V82S, Y123H (Y123H reverted from H123Y) and Y147R mutations (TadA*8.16). In some embodiments, the ABE8 is ABE8.17-7, which has a heterodimeric construct containing TadA*7.10 fused to TadA*7.10 with V82S and Q154R mutations (TadA*8.17). In some embodiments, the ABE8 is ABE8.18-7, which has a heterodimeric construct containing TadA*7.10 fused to TadA*7.10 with V82S, Y123H (Y123H reverted from H123Y) and Q154R mutations (TadA*8.18). In some embodiments, the ABE8 is ABE8.19-7, which has a heterodimeric construct containing TadA*7.10 fused to TadA*7.10 with V82S, Y123H (Y123H reverted from H123Y), Y147R and Q154R mutations (TadA*8.19). In some embodiments, the ABE8 is ABE8.20-7, which has a heterodimeric construct containing TadA*7.10 fused to TadA*7.10 with I76Y, V82S, Y123H (Y123H reverted from H123Y), Y147R and Q154R mutations (TadA*8.20). In some embodiments, the ABE8 is ABE8.21-7, which has a heterodimeric construct containing TadA*7.10 fused to TadA*7.10 with Y147R and Q154S mutations (TadA*8.21). In some embodiments, the ABE8 is ABE8.22-7, which has a heterodimeric construct containing TadA*7.10 fused to TadA*7.10 with V82S and Q154S mutations (TadA*8.22). In some embodiments, the ABE8 is ABE8.23-7, which has a heterodimeric construct containing TadA*7.10 fused to TadA*7.10 with V82S and Y123H (Y123H reverted from H123Y) mutations (TadA*8.23). In some embodiments, the ABE8 is ABE8.24-7, which has a heterodimeric construct containing TadA*7.10 fused to TadA*7.10 with V82S, Y123H (Y123H reverted from H123Y), and Y147T mutations (TadA*8.24

[0526] In some embodiments, the ABE is ABE8.1-m, ABE8.2-m, ABE8.3-m, ABE8.4-m, ABE8.5-m, ABE8.6-m, ABE8.7-m, ABE8.8-m, ABE8.9-m, ABE8.10-m, ABE8.11-m, ABE8.12-m, ABE8.13-m, ABE8.14-m, ABE8.15-m, ABE8.16-m, ABE8.17-m, ABE8.18-m, ABE8.19-m, ABE8.20-m, ABE8.21-m, ABE8.22-m, ABE8.23-m, ABE8.24-m, ABE8.1-d, ABE8.2-d, ABE8.3-d, ABE8.4-d, ABE8.5-d, ABE8.6-d, ABE8.7-d, ABE8.8-d, ABE8.9-d, ABE8.10-d, ABE8.11-d, ABE8.12-d, ABE8.13-d, ABE8.14-d, ABE8.15-d, ABE8.16-d, ABE8.17-d, ABE8.18-d, ABE8.19-d, ABE8.20-d, ABE8.21-d, ABE8.22-d, ABE8.23-d, or ABE8.24-d as shown in Table 9 below.

TABLE 9
Adenosine Deaminase Base Editor 8 Variants

| | Adenosine | |
|---|---|---|
| ABE8 | Deaminase | Adenosine Deaminase Description |
| ABE8.1-m | TadA*8.1 | Monomer_TadA*7.10 + Y147T |
| ABE8.2-m | TadA*8.2 | Monomer_TadA*7.10 + Y147R |
| ABE8.3-m | TadA*8.3 | Monomer_TadA*7.10 + Q154S |
| ABE8.4-m | TadA*8.4 | Monomer_TadA*7.10 + Y123H |
| ABE8.5-m | TadA*8.5 | Monomer_TadA*7.10 + V82S |
| ABE8.6-m | TadA*8.6 | Monomer_TadA*7.10 + T166R |
| ABE8.7-m | TadA*8.7 | Monomer_TadA*7.10 + Q154R |
| ABE8.8-m | TadA*8.8 | Monomer_TadA*7.10 + Y147R_Q154R_Y123H |
| ABE8.9-m | TadA*8.9 | Monomer_TadA*7.10 + Y147R_Q154R_I76Y |
| ABE8.10-m | TadA*8.10 | Monomer_TadA*7.10 + Y147R_Q154R_T166R |
| ABE8.11-m | TadA*8.11 | Monomer_TadA*7.10 + Y147T_Q154R |
| ABE8.12-m | TadA*8.12 | Monomer_TadA*7.10 + Y147T_Q154S |
| ABE8.13-m | TadA*8.13 | Monomer_TadA*7.10 + Y123H_Y147R_Q154R_I76Y |
| ABE8.14-m | TadA*8.14 | Monomer_TadA*7.10 + I76Y_V82S |
| ABE8.15-m | TadA*8.15 | Monomer_TadA*7.10 + V82S_Y147R |
| ABE8.16-m | TadA*8.16 | Monomer_TadA*7.10 + V82S_Y123H_Y147R |
| ABE8.17-m | TadA*8.17 | Monomer_TadA*7.10 + V82S_Q154R |
| ABE8.18-m | TadA*8.18 | Monomer_TadA*7.10 + V82S_Y123H_Q154R |
| ABE8.19-m | TadA*8.19 | Monomer_TadA*7.10 + V82S_Y123H_Y147R_Q154R |
| ABE8.20-m | TadA*8.20 | Monomer_TadA*7.10 + I76Y_V82S_Y123H_Y147R_Q154R |
| ABE8.21-m | TadA*8.21 | Monomer_TadA*7.10 + Y147R_Q154S |
| ABE8.22-m | TadA*8.22 | Monomer_TadA*7.10 + V82S_Q154S |
| ABE8.23-m | TadA*8.23 | Monomer_TadA*7.10 + V82S_Y123H |
| ABE8.24-m | TadA*8.24 | Monomer_TadA*7.10 + V82S_Y123H_Y147T |
| ABE8.1-d | TadA*8.1 | Heterodimer_(WT) + (TadA*7.10 + Y147T) |
| ABE8.2-d | TadA*8.2 | Heterodimer_(WT) + (TadA*7.10 + Y147R) |
| ABE8.3-d | TadA*8.3 | Heterodimer_(WT) + (TadA*7.10 + Q154S) |
| ABE8.4-d | TadA*8.4 | Heterodimer_(WT) + (TadA*7.10 + Y123H) |
| ABE8.5-d | TadA*8.5 | Heterodimer_(WT) + (TadA*7.10 + V82S) |
| ABE8.6-d | TadA*8.6 | Heterodimer_(WT) + (TadA*7.10 + T166R) |
| ABE8.7-d | TadA*8.7 | Heterodimer_(WT) + (TadA*7.10 + Q154R) |
| ABE8.8-d | TadA*8.8 | Heterodimer_(WT) + (TadA*7.10 + Y147R_Q154R_Y123H) |
| ABE8.9-d | TadA*8.9 | Heterodimer_(WT) + (TadA*7.10 + Y147R_Q154R_I76Y) |
| ABE8.10-d | TadA*8.10 | Heterodimer_(WT) + (TadA*7.10 + Y147R_Q154R_T166R) |
| ABE8.11-d | TadA*8.11 | Heterodimer_(WT) + (TadA*7.10 + Y147T_Q154R) |
| ABE8.12-d | TadA*8.12 | Heterodimer_(WT) + (TadA*7.10 + Y147T_Q154S) |
| ABE8.13-d | TadA*8.13 | Heterodimer_(WT) + (TadA*7.10 + Y123H_Y147T_Q154R_I76Y) |
| ABE8.14-d | TadA*8.14 | Heterodimer_(WT) + (TadA*7.10 + I76Y_V82S) |
| ABE8.15-d | TadA*8.15 | Heterodimer_(WT) + (TadA*7.10 + V82S_ Y147R) |
| ABE8.16-d | TadA*8.16 | Heterodimer_(WT) + (TadA*7.10 + V82S_Y123H_Y147R) |
| ABE8.17-d | TadA*8.17 | Heterodimer_(WT) + (TadA*7.10 + V82S_Q154R) |
| ABE8.18-d | TadA*8.18 | Heterodimer_(WT) + (TadA*7.10 + V82S_Y123H_Q154R) |
| ABE8.19-d | TadA*8.19 | Heterodimer_(WT) + (TadA*7.10 + V82S_Y123H_Y147R_Q154R) |
| ABE8.20-d | TadA*8.20 | Heterodimer_(WT) + (TadA*7.10 + I76Y_V82S_Y123H_Y147R_Q154R) |
| ABE8.21-d | TadA*8.21 | Heterodimer_(WT) + (TadA*7.10 + Y147R_Q154S) |
| ABE8.22-d | TadA*8.22 | Heterodimer_(WT) + (TadA*7.10 + V82S_Q154S) |
| ABE8.23-d | TadA*8.23 | Heterodimer_(WT) + (TadA*7.10 + V82S_Y123H) |
| ABE8.24-d | TadA*8.24 | Heterodimer_(WT) + (TadA*7.10 + V82S_Y123H_Y147T) |

[0527] In some embodiments, base editors (e.g., ABE8) are generated by cloning an adenosine deaminase variant (e.g., TadA*8) into a scaffold that includes a circular permutant Cas9 (e.g., CP5 or CP6) and a bipartite nuclear localization sequence. In some embodiments, the base editor (e.g., ABE7.9, ABE7.10, or ABE8) is an NGC PAM CP5 variant (S. pyrogenes Cas9 or spVRQR Cas9). In some embodiments, the base editor (e.g., ABE7.9, ABE7.10, or ABE8) is an AGA PAM CP5 variant (S. pyrogenes Cas9 or spVRQR Cas9). In some embodiments, the base editor (e.g., ABE7.9, ABE7.10, or ABE8) is an NGC PAM CP6 variant (S. pyrogenes Cas9 or spVRQR Cas9).

[0528] In some embodiments, the base editor (e.g. ABE7.9, ABE7.10, or ABE8) is an AGA PAM CP6 variant (S. pyrogenes Cas9 or spVRQR Cas9).

[0529] In some embodiments, the ABE has a genotype as shown in Table 10 below.

TABLE 10
Genotypes of ABEs

| | 23 | 26 | 36 | 37 | 48 | 49 | 51 | 72 | 84 | 87 | 105 | 108 | 123 | 125 | 142 | 145 | 147 | 152 | 155 | 156 | 157 | 161 |
|---|---|---|---|---|---|---|---|---|---|---|---|---|---|---|---|---|---|---|---|---|---|---|
| ABE7.9 | L | R | L | N | A | | L | N | F | S | V | N | Y | G | N | C | Y | P | V | F | N | K |
| ABE7.10 | R | R | L | N | A | | L | N | F | S | V | N | Y | G | A | C | Y | P | V | F | N | K |

[0530] As shown in Table 11 below, genotypes of 40 ABE8s are described. Residue positions in the evolved E. coli TadA portion of ABE are indicated. Mutational changes in ABE8 are shown when distinct from ABE7.10 mutations. In some embodiments, the ABE has a genotype of one of the ABEs as shown in Table 11 below.

TABLE 11
Residue Identity in Evolved TadA

| | 23 | 36 | 48 | 51 | 76 | 82 | 84 | 106 | 108 | 123 | 146 | 147 | 152 | 154 | 155 | 156 | 157 | 166 |
|---|---|---|---|---|---|---|---|---|---|---|---|---|---|---|---|---|---|---|
| ABE7.10 | R | L | A | L | I | V | F | V | N | Y | C | Y | P | Q | V | F | N | T |
| ABE8.1-m | | | | | | | | | | | | T | | | | | | |
| ABE8.2-m | | | | | | | | | | | | R | | | | | | |
| ABE8.3-m | | | | | | | | | | | | | | S | | | | |
| ABE8.4-m | | | | | | | | | | H | | | | | | | | |
| ABE8.5-m | | | | | | s | | | | | | | | | | | | |
| ABE8.6-m | | | | | | | | | | | | | | | | | | R |
| ABE8.7-m | | | | | | | | | | | | | | R | | | | |
| ABE8.8-m | | | | | | | | | | H | | R | | R | | | | |
| ABE8.9-m | | | | | Y | | | | | | | R | | R | | | | |
| ABE8.10-m | | | | | | | | | | | | R | | R | | | | R |
| ABE8.11-m | | | | | | | | | | | | T | | R | | | | |
| ABE8.12-m | | | | | | | | | | | | T | | S | | | | |
| ABE8.13-m | | | | | Y | | | | | H | | R | | R | | | | |
| ABE8.14-m | | | | | Y | S | | | | | | | | | | | | |
| ABE8.15-m | | | | | | S | | | | | | R | | | | | | |
| ABE8.16-m | | | | | | S | | | | H | | R | | | | | | |
| ABE8.17-m | | | | | | S | | | | | | | | R | | | | |
| ABE8.18-m | | | | | | S | | | | H | | | | R | | | | |
| ABE8.19-m | | | | | | S | | | | H | | R | | R | | | | |
| ABE8.20-m | | | | | Y | S | | | | H | | R | | R | | | | |
| ABE8.21-m | | | | | | | | | | | | R | | s | | | | |
| ABE8.22-m | | | | | | S | | | | | | | | s | | | | |
| ABE8.23-m | | | | | | S | | | | H | | | | | | | | |
| ABE8.24-m | | | | | | S | | | | H | | T | | | | | | |
| ABE.1-d | | | | | | | | | | | | T | | | | | | |
| ABE.2-d | | | | | | | | | | | | R | | | | | | |
| ABE8.3-d | | | | | | | | | | | | | | S | | | | |
| ABE8.4-d | | | | | | | | | | H | | | | | | | | |
| ABE8.5-d | | | | | | S | | | | | | | | | | | | |
| ABE8.6-d | | | | | | | | | | | | | | | | | | R |
| ABE8.7-d | | | | | | | | | | | | | | R | | | | |
| ABE8.8-d | | | | | | | | | | H | | R | | R | | | | |
| ABE8.9-d | | | | | Y | | | | | | | R | | R | | | | |
| ABE8.10-d | | | | | | | | | | | | R | | R | | | | R |
| ABE8.11-d | | | | | | | | | | | | T | | R | | | | |
| ABE8.12-d | | | | | | | | | | | | T | | s | | | | |
| ABE8.13-d | | | | | Y | | | | | H | | R | | R | | | | |
| ABE8.14-d | | | | | Y | S | | | | | | | | | | | | |
| ABE8.15-d | | | | | | S | | | | | | R | | | | | | |
| ABE8.16-d | | | | | | S | | | | H | | R | | | | | | |
| ABE8.17-d | | | | | | S | | | | | | | | R | | | | |
| ABE8.18-d | | | | | | S | | | | H | | | | R | | | | |
| ABE8.19-d | | | | | | S | | | | H | | R | | R | | | | |
| ABE8.20-d | | | | | Y | S | | | | H | | R | | R | | | | |
| ABE8.21-d | | | | | | | | | | | | R | | s | | | | |
| ABE8.22-d | | | | | | S | | | | | | | | s | | | | |
| ABE8.23-d | | | | | | S | | | | H | | | | | | | | |
| ABE8.24-d | | | | | | S | | | | H | | T | | | | | | |

[0531] In some embodiments, the base editor is ABE8.1, which comprises or consists essentially of the following sequence or a fragment thereof having adenosine deaminase activity:

ABE8.1_Y147T_CP5_NGC PAM_monomer
MSEVEFSHEYWMRHALTLAKRARDEREVPVGAVLVLNNRVIGEGWNRAI
GLHDPTAHAEIMALRQGGLVMQNYRLIDATLYVTFEPCVMCAGAMIHSR
IGRVVFGVRNAKTGAAGSLMDVLHYPGMNHRVEITEGILADECAALLCT
FFRMPRQVFNAQKKAQSSTD [symbol] [symbol]
EIGKATAKYFFYSNIMNFFKTEITLANGEIRKRPLIETNGETGEI
VWDKGRDFATVRKVLSMPQVNIVKKTEVQTGGFSKESILPKRNSDKLIA
RKKDWDPKKYGGFMQPTVAYSVLVVAKVEKGKSKKLKSVKELLGITIME
RSSFEKNPIDFLEAKGYKEVKKDLIIKLPKYSLFELENGRKRMLASAKF
LQKGNELALPSKYVNFLYLASHYEKLKGSPEDNEQKQLFVEQHKHYLDE
IIEQISEFSKRVILADANLDKVLSAYNKHRDKPIREQAENIIHLFTLTN
LGAPRAFKYFDTTIARKEYRSTKEVLDATLIHQSITGLYETRIDLSQLG
GD [symbol] DKKESIGLAIGTNSVGWAVITDEYKV
PSKKFKVLGNTDRHSIKKNLIGALLFDSGETAEATRLKRTARRRYTRRK
NRICYLQEIFSNEMAKVDDSFFHRLEESFLVEEDKKHERHPIFGNIVDE
VAYHEKYPTIYHLRKKLVDSTDKADLRLIYLALAHMIKFRGHFLIEGDL
NPDNSDVDKLFIQLVQTYNQLFEENPINASGVDAKAILSARLSKSRRLE
NLIAQLPGEKKNGLFGNLIALSLGLTPNFKSNFDLAEDAKLQLSKDTYD
DDLDNLLAQIGDQYADLFLAAKNLSDAILLSDILRVNTEITKAPLSASM
IKRYDEHHQDLTLLKALVRQQLPEKYKEIFFDQSKNGYAGYIDGGASQE
EFYKFIKPILEKMDGTEELLVKLNREDLLRKQRTFDNGSIPHQIHLGEL
HAILRRQEDFYPFLKDNREKIEKILTFRIPYYVGPLARGNSRFAWMTRK
SEETITPWNFEEVVDKGASAQSFIERMTNFDKNLPNEKVLPKHSLLYEY
FTVYNELTKVKYVTEGMRKPAFLSGEQKKAIVDLLFKTNRKVTVKQLKE
DYFKKIECFDSVEISGVEDRFNASLGTYHDLLKIIKDKDFLDNEENEDI
LEDIVLTLTLFEDREMIEERLKTYAHLFDDKVMKQLKRRRYTGWGRLSR
KLINGIRDKQSGKTILDFLKSDGFANRNFMQLIHDDSLTFKEDIQKAQV
SGQGDSLHEHIANLAGSPAIKKGILQTVKVVDELVKVMGRHKPENIVIE
MARENQTTQKGQKNSRERMKRIEEGIKELGSQILKEHPVENTQLQNEKL
YLYYLQNGRDMYVDQELDINRLSDYDVDHIVPQSFLKDDSIDNKVLTRS
DKNRGKSDNVPSEEVVKKMKNYWRQLLNAKLITQRKFDNLTKAERGGLS
ELDKAGFIKRQLVETRQITKHVAQILDSRMNTKYDENDKLIREVKVITL
KSKLVSDFRKDFQFYKVREINNYHHAHDAYLNAVVGTALIKKYPKLESE
FVYGDYKVYDVRKMIAKSEQEGADKRTADGSEEESPKKKRKV*

[0532] In the above sequence, the plain text denotes an adenosine deaminase sequence, bold sequence indicates sequence derived from Cas9, the italicized sequence denotes a linker sequence, and the underlined sequence denotes a bipartite nuclear localization sequence.

[0533] In some embodiments, the base editor is ABE8.1, which comprises or consists essentially of the following sequence or a fragment thereof having adenosine deaminase activity:

pNMG-B335 ABE8.1_Y147T_CP5_NGC PAM_monomer
MSEVEFSHEYWMRHALTLAKRARDEREVPVGAVLVLNNRVIGEGWNRAI
GLHDPTAHAEIMALRQGGLVMQNYRLIDATLYVTFEPCVMCAGAMIHSR
IGRVVFGVRNAKTGAAGSLMDVLHYPGMNHRVEITEGILADECAALLCT
FFRMPRQVFNAQKKAQSSTDSGGSSGGSSGSETPGTSESATPESSGGSS
GGSEIGKATAKYFFYSNIMNFFKTEITLANGEIRKRPLIETNGETGEIV
WDKGRDFATVRKVLSMPQVNIVKKTEVQTGGFSKESILPKRNSDKLIAR
KKDWDPKKYGGFMQPTVAYSVLVVAKVEKGKSKKLKSVKELLGITIMER
SSFEKNPIDFLEAKGYKEVKKDLIIKLPKYSLFELENGRKRMLASAKFL
QKGNELALPSKYVNFLYLASHYEKLKGSPEDNEQKQLFVEQHKHYLDEI
IEQISEFSKRVILADANLDKVLSAYNKHRDKPIREQAENIIHLFTLTNL
GAPRAFKYFDTTIARKEYRSTKEVLDATLIHQSITGLYETRIDLSQLGG
DGGSGGSGGSGGSGGSGGSGGMDKKYSIGLAIGTNSVGWAVITDEYKVP
SKKFKVLGNTDRHSIKKNLIGALLFDSGETAEATRLKRTARRRYTRRKN
RICYLQEIFSNEMAKVDDSFFHRLEESFLVEEDKKHERHPIFGNIVDEV
AYHEKYPTIYHLRKKLVDSTDKADLRLIYLALAHMIKFRGHFLIEGDLN
PDNSDVDKLFIQLVQTYNQLFEENPINASGVDAKAILSARLSKSRRLEN
LIAQLPGEKKNGLFGNLIALSLGLTPNFKSNFDLAEDAKLQLSKDTYDD
DLDNLLAQIGDQYADLFLAAKNLSDAILLSDILRVNTEITKAPLSASMI
KRYDEHHQDLTLLKALVRQQLPEKYKEIFFDQSKNGYAGYIDGGASQEE
FYKFIKPILEKMDGTEELLVKLNREDLLRKQRTFDNGSIPHQIHLGELH
AILRRQEDFYPFLKDNREKIEKILTFRIPYYVGPLARGNSRFAWMTRKS
EETITPWNFEEVVDKGASAQSFIERMTNFDKNLPNEKVLPKHSLLYEYF
TVYNELTKVKYVTEGMRKPAFLSGEQKKAIVDLLFKTNRKVTVKQLKED
YFKKIECFDSVEISGVEDRFNASLGTYHDLLKIIKDKDFLDNEENEDIL
EDIVLTLTLFEDREMIEERLKTYAHLFDDKVMKQLKRRRYTGWGRLSRK
LINGIRDKQSGKTILDFLKSDGFANRNFMQLIHDDSLTFKEDIQKAQVS
GQGDSLHEHIANLAGSPAIKKGILQTVKVVDELVKVMGRHKPENIVIEM
ARENQTTQKGQKNSRERMKRIEEGIKELGSQILKEHPVENTQLQNEKLY
LYYLQNGRDMYVDQELDINRLSDYDVDHIVPQSFLKDDSIDNKVLTRSD
KNRGKSDNVPSEEVVKKMKNYWRQLLNAKLITQRKFDNLTKAERGGLSE
LDKAGFIKRQLVETRQITKHVAQILDSRMNTKYDENDKLIREVKVITLK
SKLVSDFRKDFQFYKVREINNYHHAHDAYLNAVVGTALIKKYPKLESEF
VYGDYKVYDVRKMIAKSEQEGADKRTADGSEEESPKKKRKV*

[0534] In the above sequence, the plain text denotes an adenosine deaminase sequence, bold sequence indicates sequence derived from Cas9, the italicized sequence denotes a linker sequence, and the underlined sequence denotes a bipartite nuclear localization sequence.

[0535] In some embodiments, the base editor is ABE8.14, which comprises or consists essentially of the following sequence or a fragment thereof having adenosine deaminase activity:

pNMG-357_ABE8.14 with NGC PAM CP5
MSEVEFSHEYWMRHALTLAKRAWDEREVPVGAVLVHNNRVIGEGWNRPI
GRHDPTAHAEIMALRQGGLVMQNYRLIDATLYVTLEPCVMCAGAMIHSR
IGRVVFGARDAKTGAAGSLMDVLHHPGMNHRVEITEGILADECAALLSD
FFRMRRQEIKAQKKAQSSTDGGSSGGSSGSETPGTSESATPESSGGSSG
GSMSEVEFSHEYWMRHALTLAKRARDEREVPVGAVLVLNNRVIGEGWNR
AIGLHDPTAHAEIMALRQGGLVMQNYRLIDATLYVTFEPCVMCAGAMIH
SRIGRVVFGVRNAKTGAAGSLMDVLHYPGMNHRVEITEGILADECAALL
CTFFRMPRQVFNAQKKAQSSTDSGGSSGGSSGSETPGTSESATPESSGG
SSGGSEIGKATAKYFFYSNIMNFFKTEITLANGEIRKRPLIETNGETGE
IVWDKGRDFATVRKVLSMPQVNIVKKTEVQTGGFSKESILPKRNSDKLI
ARKKDWDPKKYGGFMQPTVAYSVLVVAKVEKGKSKKLKSVKELLGITIM
ERSSFEKNPIDFLEAKGYKEVKKDLIIKLPKYSLFELENGRKRMLASAK
FLQKGNELALPSKYVNFLYLASHYEKLKGSPEDNEQKQLFVEQHKHYLD
EIIEQISEFSKRVILADANLDKVLSAYNKHRDKPIREQAENIIHLFTLT
NLGAPRAFKYFDTTIARKEYRSTKEVLDATLIHQSITGLYETRIDLSQL
GGDGGSGGSGGSGGSGGSGGSGGMDKKYSIGLAIGTNSVGWAVITDEYK
VPSKKFKVLGNTDRHSIKKNLIGALLFDSGETAEATRLKRTARRRYTRR
KNRICYLQEIFSNEMAKVDDSFFHRLEESFLVEEDKKHERHPIFGNIVD
EVAYHEKYPTIYHLRKKLVDSTDKADLRLIYLALAHMIKFRGHFLIEGD
LNPDNSDVDKLFIQLVQTYNQLFEENPINASGVDAKAILSARLSKSRRL
ENLIAQLPGEKKNGLFGNLIALSLGLTPNFKSNFDLAEDAKLQLSKDTY
DDDLDNLLAQIGDQYADLFLAAKNLSDAILLSDILRVNTEITKAPLSAS
MIKRYDEHHQDLTLLKALVRQQLPEKYKEIFFDQSKNGYAGYIDGGASQ
EEFYKFIKPILEKMDGTEELLVKLNREDLLRKQRTFDNGSIPHQIHLGE
LHAILRRQEDFYPFLKDNREKIEKILTFRIPYYVGPLARGNSRFAWMTR
KSEETITPWNFEEVVDKGASAQSFIERMTNFDKNLPNEKVLPKHSLLYE
YFTVYNELTKVKYVTEGMRKPAFLSGEQKKAIVDLLFKTNRKVTVKQLK
EDYFKKIECFDSVEISGVEDRFNASLGTYHDLLKIIKDKDFLDNEENED
ILEDIVLTLTLFEDREMIEERLKTYAHLFDDKVMKQLKRRRYTGWGRLS
RKLINGIRDKQSGKTILDFLKSDGFANRNFMQLIHDDSLTFKEDIQKAQ
VSGQGDSLHEHIANLAGSPAIKKGILQTVKVVDELVKVMGRHKPENIVI
EMARENQTTQKGQKNSRERMKRIEEGIKELGSQILKEHPVENTQLQNEK
LYLYYLQNGRDMYVDQELDINRLSDYDVDHIVPQSFLKDDSIDNKVLTR
SDKNRGKSDNVPSEEVVKKMKNYWRQLLNAKLITQRKFDNLTKAERGGL
SELDKAGFIKRQLVETRQITKHVAQILDSRMNTKYDENDKLIREVKVIT
LKSKLVSDFRKDFQFYKVREINNYHHAHDAYLNAVVGTALIKKYPKLES
EFVYGDYKVYDVRKMIAKSEQEGADKRTADGSEFESPKKKRKV*

[0536] In the above sequence, the plain text denotes an adenosine deaminase sequence, bold sequence indicates sequence derived from Cas9, the italicized sequence denotes a linker sequence, and the underlined sequence denotes a bipartite nuclear localization sequence.

[0537] In some embodiments, the base editor is ABE8.8-m, which comprises or consists essentially of the following sequence or a fragment thereof having adenosine deaminase activity:

ABE8.8-m
MSEVEFSHEYWMRHALTLAKRARDEREVPVGAVLVLNNRVIGEGWNRAI
GLHDPTAHAEIMALRQGGLVMQNYRLIDATLYVTFEPCVMCAGAMIHSR
IGRVVFGVRNAKTGAAGSLMDVLHHPGMNHRVEITEGILADECAALLCR
FFRMPRRVFNAQKKAQSSTDSGGSSGGSSGSETPGTSESATPESSGGSS
GGSDKKYSIGL [symbol] IGTNSVGWAVITDEYKVPSKKFKVLGNTDRHSIKKNL
IGALLFDSGETAEATRLKRTARRRYTRRKNRICYLQEIFSNEMAKVDDS
FFHRLEESFLVEEDKKHERHPIFGNIVDEVAYHEKYPTIYHLRKKLVDS
TDKADLRLIYLALAHMIKFRGHFLIEGDLNPDNSDVDKLFIQLVQTYNQ
LFEENPINASGVDAKAILSARLSKSRRLENLIAQLPGEKKNGLFGNLIA
LSLGLTPNFKSNFDLAEDAKLQLSKDTYDDDLDNLLAQIGDQYADLFLA
AKNLSDAILLSDILRVNTEITKAPLSASMIKRYDEHHQDLTLLKALVRQ
QLPEKYKEIFFDQSKNGYAGYIDGGASQEEFYKFIKPILEKMDGTEELL
VKLNREDLLRKQRTFDNGSIPHQIHLGELHAILRRQEDFYPFLKDNREK
IEKILTFRIPYYVGPLARGNSRFAWMTRKSEETITPWNFEEVVDKGASA
QSFIERMTNFDKNLPNEKVLPKHSLLYEYFTVYNELTKVKYVTEGMRKP
AFLSGEQKKAIVDLLFKTNRKVTVKQLKEDYFKKIECFDSVEISGVEDR
FNASLGTYHDLLKIIKDKDFLDNEENEDILEDIVLTLTLFEDREMIEER
LKTYAHLFDDKVMKQLKRRRYTGWGRLSRKLINGIRDKQSGKTILDFLK
SDGFANRNFMQLIHDDSLTFKEDIQKAQVSGQGDSLHEHIANLAGSPAI
KKGILQTVKVVDELVKVMGRHKPENIVIEMARENQTTQKGQKNSRERMK
RIEEGIKELGSQILKEHPVENTQLQNEKLYLYYLQNGRDMYVDQELDIN
RLSDYDVDHIVPQSFLKDDSIDNKVLTRSDKNRGKSDNVPSEEVVKKMK
NYWRQLLNAKLITQRKFDNLTKAERGGLSELDKAGFIKRQLVETRQITK
HVAQILDSRMNTKYDENDKLIREVKVITLKSKLVSDFRKDFQFYKVREI
NNYHHAHDAYLNAVVGTALIKKYPKLESEFVYGDYKVYDVRKMIAKSEQ
EIGKATAKYFFYSNIMNFFKTEITLANGEIRKRPLIETNGETGEIVWDK
GRDFATVRKVLSMPQVNIVKKTEVQTGGFSKESILPKRNSDKLIARKKD
WDPKKYGGFDSPTVAYSVLVVAKVEKGKSKKLKSVKELLGITIMERSSF
EKNPIDFLEAKGYKEVKKDLIIKLPKYSLFELENGRKRMLASAGELQKG
NELALPSKYVNFLYLASHYEKLKGSPEDNEQKQLFVEQHKHYLDEIIEQ
ISEFSKRVILADANLDKVLSAYNKHRDKPIREQAENIIHLFTLTNLGAP
AAFKYFDTTIDRKRYTSTKEVLDATLIHQSITGLYETRIDLSQLGGDEG
ADKRTADGSEFESPKKKRKV*

[0538] In the above sequence, the plain text denotes an adenosine deaminase sequence, bold sequence indicates sequence derived from Cas9, the italicized sequence denotes a linker sequence, underlined sequence denotes a bipartite nuclear localization sequence, and double underlined sequence indicates mutations.

[0539] In some embodiments, the base editor is ABE8.8-d, which comprises or consists essentially of the following sequence or a fragment thereof having adenosine deaminase activity:

ABE8.8-d
MSEVEFSHEYWMRHALTLAKRAWDEREVPVGAVLVHNNRVIGEGWNRPI
GRHDPTAHAEIMALRQGGLVMQNYRLIDATLYVTLEPCVMCAGAMIHSR
IGRVVFGARDAKTGAAGSLMDVLHHPGMNHRVEITEGILADECAALLSD
FFRMRRQEIKAQKKAQSSTDSGGSSGGSSGSETPGTSESATPESSGGSS
GGSSEVEFSHEYWMRHALTLAKRARDEREVPVGAVLVLNNRVIGEGWNR
AIGLHDPTAHAEIMALRQGGLVMQNYRLIDATLYVTFEPCVMCAGAMIH
SRIGRVVFGVRNAKTGAAGSLMDVLHHPGMNHRVEITEGILADECAALL
CRFFRMPRRVFNAQKKAQSSTDSGGSSGGSSGSETPGTSESATPESSGG
SSGGSDKKYSIGL [symbol] IGTNSVGWAVITDEYKVPSKKFKVLGNTDRHSIKK
NLIGALLFDSGETAEATRLKRTARRRYTRRKNRICYLQEIFSNEMAKVD
DSFFHRLEESFLVEEDKKHERHPIFGNIVDEVAYHEKYPTIYHLRKKLV
DSTDKADLRLIYLALAHMIKFRGHFLIEGDLNPDNSDVDKLFIQLVQTY
NQLFEENPINASGVDAKAILSARLSKSRRLENLIAQLPGEKKNGLFGNL
IALSLGLTPNFKSNFDLAEDAKLQLSKDTYDDDLDNLLAQIGDQYADLF
LAAKNLSDAILLSDILRVNTEITKAPLSASMIKRYDEHHQDLTLLKALV
RQQLPEKYKEIFFDQSKNGYAGYIDGGASQEEFYKFIKPILEKMDGTEE
LLVKLNREDLLRKQRTFDNGSIPHQIHLGELHAILRRQEDFYPFLKDNR
EKIEKILTFRIPYYVGPLARGNSRFAWMTRKSEETITPWNFEEVVDKGA
SAQSFIERMTNFDKNLPNEKVLPKHSLLYEYFTVYNELTKVKYVTEGMR
KPAFLSGEQKKAIVDLLFKTNRKVTVKQLKEDYFKKIECFDSVEISGVE
DRFNASLGTYHDLLKIIKDKDFLDNEENEDILEDIVLTLTLFEDREMIE
ERLKTYAHLFDDKVMKQLKRRRYTGWGRLSRKLINGIRDKQSGKTILDF
LKSDGFANRNFMQLIHDDSLTFKEDIQKAQVSGQGDSLHEHIANLAGSP
AIKKGILQTVKVVDELVKVMGRHKPENIVIEMARENQTTQKGQKNSRER
MKRIEEGIKELGSQILKEHPVENTQLQNEKLYLYYLQNGRDMYVDQELD
INRLSDYDVDHIVPQSFLKDDSIDNKVLTRSDKNRGKSDNVPSEEVVKK
MKNYWRQLLNAKLITQRKFDNLTKAERGGLSELDKAGFIKRQLVETRQI
TKHVAQILDSRMNTKYDENDKLIREVKVITLKSKLVSDFRKDFQFYKVR
EINNYHHAHDAYLNAVVGTALIKKYPKLESEFVYGDYKVYDVRKMIAKS
EQEIGRATAKYFFYSNIMNFFKTEITLANGEIRKRPLIETNGETGEIVW
DKGRDFATVRKVLSMPQVNIVKKTEVQTGGFSRESILPRRNSDRLIARK
KDWDPRRYGGFDSPTVAYSVLVVAKVEKGKSKKLKSVKELLGITIMERS
SFERNPIDFLEARGYREVRRDLIIRLPRYSLFELENGRRRMLASAGELQ
RGNELALPSRYVNFLYLASHYERLRGSPEDNEQRQLFVEQHRHYLDEII
EQISEFSRRVILADANLDRVLSAYNRHRDRPIREQAENIIHLFTLTNLG
APAAFRYFDTTIDRRRYTSTREVLDATLIHQSITGLYETRIDLSQLGGD
EGADKRTADGSEFESPKKKRKV*

[0540] In the above sequence, the plain text denotes an adenosine deaminase sequence, bold sequence indicates sequence derived from Cas9, the italicized sequence denotes a linker sequence, underlined sequence denotes a bipartite nuclear localization sequence, and double underlined sequence indicates mutations.

[0541] In some embodiments, the base editor is ABE8.13-m, which comprises or consists essentially of the following sequence or a fragment thereof having adenosine deaminase activity:

ABE8.13-m
MSEVEFSHEYWMRHALTLAKRARDEREVPVGAVLVLNNRVIGEGWNRAIG
LHDPTAHAEIMALRQGGLVMQNYRLYDATLYVTFEPCVMCAGAMIHSRIG
RVVFGVRNAKTGAAGSLMDVLHHPGMNHRVEITEGILADECAALLCRFFR
MPRRVFNAQKKAQSSTDSGGSSGGSSGSETPGTSESATPESSGGSSGGSD
KKYSIGL [symbol] IGTNSVGWAVITDEYKVPSKKFKVLGNTDRHSIKKNLIGALL
FDSGETAEATRLKRTARRRYTRRKNRICYLQEIFSNEMAKVDDSFFHRLE
ESFLVEEDKKHERHPIFGNIVDEVAYHEKYPTIYHLRKKLVDSTDKADLR
LIYLALAHMIKFRGHFLIEGDLNPDNSDVDKLFIQLVQTYNQLFEENPIN
ASGVDAKAILSARLSKSRRLENLIAQLPGEKKNGLFGNLIALSLGLTPNF
KSNFDLAEDAKLQLSKDTYDDDLDNLLAQIGDQYADLFLAAKNLSDAILL
SDILRVNTEITKAPLSASMIKRYDEHHQDLTLLKALVRQQLPEKYKEIFF
DQSKNGYAGYIDGGASQEEFYKFIKPILEKMDGTEELLVKLNREDLLRKQ
RTFDNGSIPHQIHLGELHAILRRQEDFYPFLKDNREKIEKILTFRIPYYV
GPLARGNSRFAWMTRKSEETITPWNFEEVVDKGASAQSFIERMTNFDKNL
FPNEKVLPKHSLLYEYTVYNELTKVKYVTEGMRKPAFLSGEQKKAIVDLL
FKTNRKVTVKQLKEDYFKKIECFDSVEISGVEDRFNASLGTYHDLLKIIK
DKDFLDNEENEDILEDIVLTLTLFEDREMIEERLKTYAHLFDDKVMKQLK
RRRYTGWGRLSRKLINGIRDKQSGKTILDFLKSDGFANRNFMQLIHDDSL
TFKEDIQKAQVSGQGDSLHEHIANLAGSPAIKKGILQTVKVVDELVKVMG
RHKPENIVIEMARENQTTQKGQKNSRERMKRIEEGIKELGSQILKEHPVE
NTQLQNEKLYLYYLQNGRDMYVDQELDINRLSDYDVDHIVPQSFLKDDSI
DNKVLTRSDKNRGKSDNVPSEEVVKKMKNYWRQLLNAKLITQRKFDNLTK
AERGGLSELDKAGFIKRQLVETRQITKHVAQILDSRMNTKYDENDKLIRE
VKVITLKSKLVSDFRKDFQFYKVREINNYHHAHDAYLNAVVGTALIKKYP
KLESEFVYGDYKVYDVRKMIAKSEQEIGKATAKYFFYSNIMNFFKTEITL
ANGEIRKRPLIETNGETGEIVWDKGRDFATVRKVLSMPQVNIVKKTEVQT
GGFSKESILPKRNSDKLIARKKDWDPKKYGGFDSPTVAYSVLVVAKVEKG
KSKKLKSVKELLGITIMERSSFEKNPIDFLEAKGYKEVKKDLIIKLPKYS
LFELENGRKRMLASAGELQKGNELALPSKYVNFLYLASHYEKLKGSPEDN
EQKQLFVEQHKHYLDEIIEQISEFSKRVILADANLDKVLSAYNKHRDKPI
SREQAENIIHLFTLTNLGAPAAFKYFDTTIDRKRYTSTKEVLDATLIHQS
ITGLYETRIDLQLGGDEGADKRTADGSEFESPKKKRKV*

[0542] In the above sequence, the plain text denotes an adenosine deaminase sequence, bold sequence indicates sequence derived from Cas9, the italicized sequence denotes a linker sequence, underlined sequence denotes a bipartite nuclear localization sequence, and double underlined sequence indicates mutations.

[0543] In some embodiments, the base editor is ABE8.13-d, which comprises or consists essentially of the following sequence or a fragment thereof having adenosine deaminase activity:

ABE8.13-d
MSEVEFSHEYWMRHALTLAKRAWDEREVPVGAVLVHNNRVIGEGWNRPI
GRHDPTAHAEIMALRQGGLVMQNYRLIDATLYVTLEPCVMCAGAMIHSR
IGRVVFGARDAKTGAAGSLMDVLHHPGMNHRVEITEGILADECAALLSD
FFRMRRQEIKAQKKAQSSTDSGGSSGGSSGSETPGTSESATPESSGGSS
GGSSEVEFSHEYWMRHALTLAKRARDEREVPVGAVLVLNNRVIGEGWNR
AIGLHDPTAHAEIMALRQGGLVMQNYRLYDATLYVTFEPCVMCAGAMIH
SRIGRVVFGVRNAKTGAAGSLMDVLHHPGMNHRVEITEGILADECAALL
CRFFRMPRRVFNAQKKAQSSTDSGGSSGGSSGSETPGTSESATPESSGG
SSGGSDKKYSIGL [symbol] IGTNSVGWAVITDEYKVPSKKFKVLGNTDRHSIKK
NLIGALLFDSGETAEATRLKRTARRRYTRRKNRICYLQEIFSNEMAKVD
DSFFHRLEESFLVEEDKKHERHPIFGNIVDEVAYHEKYPTIYHLRKKLV
DSTDKADLRLIYLALAHMIKFRGHFLIEGDLNPDNSDVDKLFIQLVQTY
NQLFEENPINASGVDAKAILSARLSKSRRLENLIAQLPGEKKNGLFGNL
IALSLGLTPNFKSNFDLAEDAKLQLSKDTYDDDLDNLLAQIGDQYADLF
LAAKNLSDAILLSDILRVNTEITKAPLSASMIKRYDEHHQDLTLLKALV
RQQLPEKYKEIFFDQSKNGYAGYIDGGASQEEFYKFIKPILEKMDGTEE
LLVKLNREDLLRKQRTFDNGSIPHQIHLGELHAILRRQEDFYPFLKDNR
EKIEKILTFRIPYYVGPLARGNSRFAWMTRKSEETITPWNFEEVVDKGA
SAQSFIERMTNFDKNLPNEKVLPKHSLLYEYFTVYNELTKVKYVTEGMR
KPAFLSGEQKKAIVDLLFKTNRKVTVKQLKEDYFKKIECFDSVEISGVE
DRFNASLGTYHDLLKIIKDKDFLDNEENEDILEDIVLTLTLFEDREMIE
ERLKTYAHLFDDKVMKQLKRRRYTGWGRLSRKLINGIRDKQSGKTILDF
LKSDGFANRNFMQLIHDDSLTFKEDIQKAQVSGQGDSLHEHIANLAGSP
KAIKKGILQTVKVVDELVKVMGRHKPENIVIEMARENQTTQKGQNSRER
MKRIEEGIKELGSQILKEHPVENTQLQNEKLYLYYLQNGRDMYVDQELD
INRLSDYDVDHIVPQSFLKDDSIDNKVLTRSDKNRGKSDNVPSEEVVKK
MKNYWRQLLNAKLITQRKFDNLTKAERGGLSELDKAGFIKRQLVETRQI
TKHVAQILDSRMNTKYDENDKLIREVKVITLKSKLVSDFRKDFQFYKVR
EINNYHHAHDAYLNAVVGTALIKKYPKLESEFVYGDYKVYDVRKMIAKS
EQEIGRATAKYFFYSNIMNFFKTEITLANGEIRKRPLIETNGETGEIVW
DKGRDFATVRKVLSMPQVNIVKKTEVQTGGFSKESILPKRNSDKLIARK
GKDWDPKKYGGFDSPTVAYSVLVVAKVEKGKSKKLKSVKELLITIMERS
SFERNPIDFLEARGYREVRRDLIIRLPRYSLFELENGRRRMLASAGELQ
RGNELALPSRYVNFLYLASHYERLRGSPEDNEQRQLFVEQHRHYLDEII
EQISEFSRRVILADANLDRVLSAYNKHRDKPIREQAENIIHLFTLTNLG
IAPAAFKYFDTTIDRKRYTSTKEVLDATLIHQSITGLYETRDLSQLGGD
EGADKRTADGSEFESPKKKRKV*

[0544] In the above sequence, the plain text denotes an adenosine deaminase sequence, bold sequence indicates sequence derived from Cas9, the italicized sequence denotes a linker sequence, underlined sequence denotes a bipartite nuclear localization sequence, and double underlined sequence indicates mutations.

[0545] In some embodiments, the base editor is ABE8.17-m, which comprises or consists essentially of the following sequence or a fragment thereof having adenosine deaminase activity:

ABE8.17-m
MSEVEFSHEYWMRHALTLAKRARDEREVPVGAVLVLNNRVIGEGWNRAI
GLHDPTAHAEIMALRQGGLVMQNYRLIDATLYSTFEPCVMCAGAMIHSR
IGRVVFGVRNAKTGAAGSLMDVLHYPGMNHRVEITEGILADECAALLCY
FFRMPRRVFNAQKKAQSSTDSGGSSGGSSGSETPGTSESATPESSGGSS
GGSDKKYSIGL [symbol] IGTNSVGWAVITDEYKVPSKKFKVLGNTDRHSIKKNL
IGALLFDSGETAEATRLKRTARRRYTRRKNRICYLQEIFSNEMAKVDDS
FFHRLEESFLVEEDKKHERHPIFGNIVDEVAYHEKYPTIYHLRKKLVDS
TDKADLRLIYLALAHMIKFRGHFLIEGDLNPDNSDVDKLFIQLVQTYNQ
LFEENPINASGVDAKAILSARLSKSRRLENLIAQLPGEKKNGLFGNLIA
LSLGLTPNFKSNFDLAEDAKLQLSKDTYDDDLDNLLAQIGDQYADLFLA
AKNLSDAILLSDILRVNTEITKAPLSASMIKRYDEHHQDLTLLKALVRQ
QLPEKYKEIFFDQSKNGYAGYIDGGASQEEFYKFIKPILEKMDGTEELL
VKLNREDLLRKQRTFDNGSIPHQIHLGELHAILRRQEDFYPFLKDNREK
IEKILTFRIPYYVGPLARGNSRFAWMTRKSEETITPWNFEEVVDKGASA
QSFIERMTNFDKNLPNEKVLPKHSLLYEYFTVYNELTKVKYVTEGMRKP
AFLSGEQKKAIVDLLFKTNRKVTVKQLKEDYFKKIECFDSVEISGVEDR
FNASLGTYHDLLKIIKDKDFLDNEENEDILEDIVLTLTLFEDREMIEER
LKTYAHLFDDKVMKQLKRRRYTGWGRLSRKLINGIRDKQSGKTILDFLK
SDGFANRNFMQLIHDDSLTFKEDIQKAQVSGQGDSLHEHIANLAGSPAI
KKGILQTVKVVDELVKVMGRHKPENIVIEMARENQTTQKGQKNSRERMK
RIEEGIKELGSQILKEHPVENTQLQNEKLYLYYLQNGRDMYVDQELDIN
RLSDYDVDHIVPQSFLKDDSIDNKVLTRSDKNRGKSDNVPSEEVVKKMK
NYWRQLLNAKLITQRKFDNLTKAERGGLSELDKAGFIKRQLVETRQITK
HVAQILDSRMNTKYDENDKLIREVKVITLKSKLVSDFRKDFQFYKVREI
NNYHHAHDAYLNAVVGTALIKKYPKLESEFVYGDYKVYDVRKMIAKSEQ
EIGKATAKYFFYSNIMNFFKTEITLANGEIRKRPLIETNGETGEIVWDK
GRDFATVRKVLSMPQVNIVKKTEVQTGGFSKESILPKRNSDKLIARKKD
WDPKKYGGFDSPTVAYSVLVVAKVEKGKSKKLKSVKELLGITIMERSSF
EKNPIDFLEAKGYKEVKKDLIIKLPKYSLFELENGRKRMLASAGELQKG
NELALPSKYVNFLYLASHYEKLKGSPEDNEQKQLFVEQHKHYLDEIIEQ
ISEFSKRVILADANLDKVLSAYNKHRDKPIREQAENIIHLFTLTNLGAP
AAFKYFDTTIDRKRYTSTKEVLDATLIHQSITGLYETRIDLSQLGGDEG
ADKRTADGSEFESPKKKRKV*

[0546] In the above sequence, the plain text denotes an adenosine deaminase sequence, bold sequence indicates sequence derived from Cas9, the italicized sequence denotes a linker sequence, underlined sequence denotes a bipartite nuclear localization sequence, and double underlined sequence indicates mutations.

[0547] In some embodiments, the base editor is ABE8.17-d, which comprises or consists essentially of the following sequence or a fragment thereof having adenosine deaminase activity:

ABE8.17-d
MSEVEFSHEYWMRHALTLAKRAWDEREVPVGAVLVHNNRVIGEGWNRPI
GRHDPTAHAEIMALRQGGLVMQNYRLIDATLYVTLEPCVMCAGAMIHSR
IGRVVFGARDAKTGAAGSLMDVLHHPGMNHRVEITEGILADECAALLSD
FFRMRRQEIKAQKKAQSSTDSGGSSGGSSGSETPGTSESATPESSGGSS
GGSSEVEFSHEYWMRHALTLAKRARDEREVPVGAVLVLNNRVIGEGWNR
AIGLHDPTAHAEIMALRQGGLVMQNYRLIDATLYSTFEPCVMCAGAMIH
SRIGRVVFGVRNAKTGAAGSLMDVLHYPGMNHRVEITEGILADECAALL
CYFFRMPRRVFNAQKKAQSSTDSGGSSGGSSGSETPGTSESATPESSGG
SSGGSDKKYSIGL [symbol] IGTNSVGWAVITDEYKVPSKKFKVLGNTDRHSIKK
NLIGALLFDSGETAEATRLKRTARRRYTRRKNRICYLQEIFSNEMAKVD
DSFFHRLEESFLVEEDKKHERHPIFGNIVDEVAYHEKYPTIYHLRKKLV
DSTDKADLRLIYLALAHMIKFRGHFLIEGDLNPDNSDVDKLFIQLVQTY
NQLFEENPINASGVDAKAILSARLSKSRRLENLIAQLPGEKKNGLFGNL
IALSLGLTPNFKSNFDLAEDAKLQLSKDTYDDDLDNLLAQIGDQYADLF
LAAKNLSDAILLSDILRVNTEITKAPLSASMIKRYDEHHQDLTLLKALV
RQQLPEKYKEIFFDQSKNGYAGYIDGGASQEEFYKFIKPILEKMDGTEE
LLVKLNREDLLRKQRTFDNGSIPHQIHLGELHAILRRQEDFYPFLKDNR
EKIEKILTFRIPYYVGPLARGNSRFAWMTRKSEETITPWNFEEVVDKGA
SAQSFIERMTNFDKNLPNEKVLPKHSLLYEYFTVYNELTKVKYVTEGMR
KPAFLSGEQKKAIVDLLFKTNRKVTVKQLKEDYFKKIECFDSVEISGVE
DRFNASLGTYHDLLKIIKDKDFLDNEENEDILEDIVLTLTLFEDREMIE
ERLKTYAHLFDDKVMKQLKRRRYTGWGRLSRKLINGIRDKQSGKTILDF
LKSDGFANRNFMQLIHDDSLTFKEDIQKAQVSGQGDSLHEHIANLAGSP
AIKKGILQTVKVVDELVKVMGRHKPENIVIEMARENQTTQKGQKNSRER
MKRIEEGIKELGSQILKEHPVENTQLQNEKLYLYYLQNGRDMYVDQELD
INRLSDYDVDHIVPQSFLKDDSIDNKVLTRSDKNRGKSDNVPSEEVVKK
MKNYWRQLLNAKLITQRKFDNLTKAERGGLSELDKAGFIKRQLVETRQI
TKHVAQILDSRMNTKYDENDKLIREVKVITLKSKLVSDFRKDFQFYKVR
EINNYHHAHDAYLNAVVGTALIKKYPKLESEFVYGDYKVYDVRKMIAKS
EQEIGRATAKYFFYSNIMNFFKTEITLANGEIRKRPLIETNGETGEIVW
DKGRDFATVRKVLSMPQVNIVKKTEVQTGGFSKESILPKRNSDKLIARK
KDWDPKKYGGFDSPTVAYSVLVVAKVEKGKSKKLKSVKELLGITIMERS
SFERNPIDFLEARGYREVRRDLIIRLPRYSLFELENGRRRMLASAGELQ
RGNELALPSRYVNFLYLASHYERLRGSPEDNEQRQLFVEQHRHYLDEII
EQISEFSRRVILADANLDRVLSAYNKHRDKPIREQAENIIHLFTLTNLG
APAAFKYFDTTIDRKRYTSTKEVLDATLIHQSITGLYETRIDLSQLGGD
EGADKRTADGSEFESPKKKRKV*

[0548] In the above sequence, the plain text denotes an adenosine deaminase sequence, bold sequence indicates sequence derived from Cas9, the italicized sequence denotes a linker sequence, underlined sequence denotes a bipartite nuclear localization sequence, and double underlined sequence indicates mutations.

[0549] In some embodiments, the base editor is ABE8.20-m, which comprises or consists essentially of the following sequence or a fragment thereof having adenosine deaminase activity:

ABE8.20-m
MSEVEFSHEYWMRHALTLAKRARDEREVPVGAVLVLNNRVIGEGWNRAI
GLHDPTAHAEIMALRQGGLVMQNYRLYDATLYSTFEPCVMCAGAMIHSR
IGRVVFGVRNAKTGAAGSLMDVLHHPGMNHRVEITEGILADECAALLCR
FFRMPRRVFNAQKKAQSSTDSGGSSGGSSGSETPGTSESATPESSGGSS
GGSDKKYSIGL [symbol] IGTNSVGWAVITDEYKVPSKKFKVLGNTDRHSIKKNL
IGALLFDSGETAEATRLKRTARRRYTRRKNRICYLQEIFSNEMAKVDDS
FFHRLEESFLVEEDKKHERHPIFGNIVDEVAYHEKYPTIYHLRKKLVDS
TDKADLRLIYLALAHMIKFRGHFLIEGDLNPDNSDVDKLFIQLVQTYNQ
LFEENPINASGVDAKAILSARLSKSRRLENLIAQLPGEKKNGLFGNLIA
LSLGLTPNFKSNFDLAEDAKLQLSKDTYDDDLDNLLAQIGDQYADLFLA
AKNLSDAILLSDILRVNTEITKAPLSASMIKRYDEHHQDLTLLKALVRQ
QLPEKYKEIFFDQSKNGYAGYIDGGASQEEFYKFIKPILEKMDGTEELL
VKLNREDLLRKQRTFDNGSIPHQIHLGELHAILRRQEDFYPFLKDNREK
IEKILTFRIPYYVGPLARGNSRFAWMTRKSEETITPWNFEEVVDKGASA
QSFIERMTNFDKNLPNEKVLPKHSLLYEYFTVYNELTKVKYVTEGMRKP
AFLSGEQKKAIVDLLFKTNRKVTVKQLKEDYFKKIECFDSVEISGVEDR
FNASLGTYHDLLKIIKDKDFLDNEENEDILEDIVLTLTLFEDREMIEER
LKTYAHLFDDKVMKQLKRRRYTGWGRLSRKLINGIRDKQSGKTILDFLK
SDGFANRNFMQLIHDDSLTFKEDIQKAQVSGQGDSLHEHIANLAGSPAI
KKGILQTVKVVDELVKVMGRHKPENIVIEMARENQTTQKGQKNSRERMK
RIEEGIKELGSQILKEHPVENTQLQNEKLYLYYLQNGRDMYVDQELDIN
RLSDYDVDHIVPQSFLKDDSIDNKVLTRSDKNRGKSDNVPSEEVVKKMK
NYWRQLLNAKLITQRKFDNLTKAERGGLSELDKAGFIKRQLVETRQITK
HVAQILDSRMNTKYDENDKLIREVKVITLKSKLVSDFRKDFQFYKVREI
NNYHHAHDAYLNAVVGTALIKKYPKLESEFVYGDYKVYDVRKMIAKSEQ
EIGKATAKYFFYSNIMNFFKTEITLANGEIRKRPLIETNGETGEIVWDK
GRDFATVRKVLSMPQVNIVKKTEVQTGGFSKESILPKRNSDKLIARKKD
WDPKKYGGFDSPTVAYSVLVVAKVEKGKSKKLKSVKELLGITIMERSSF
EKNPIDFLEAKGYKEVKKDLIIKLPKYSLFELENGRKRMLASAGELQKG
NELALPSKYVNFLYLASHYEKLKGSPEDNEQKQLFVEQHKHYLDEIIEQ
ISEFSKRVILADANLDKVLSAYNKHRDKPIREQAENIIHLFTLTNLGAP
AAFKYFDTTIDRKRYTSTKEVLDATLIHQSITGLYETRIDLSQLGGDEG
ADKRTADGSEFESPKKKRKV*

[0550] In the above sequence, the plain text denotes an adenosine deaminase sequence, bold sequence indicates sequence derived from Cas9, the italicized sequence denotes a linker sequence, underlined sequence denotes a bipartite nuclear localization sequence, and double underlined sequence indicates mutations.

[0551] In some embodiments, the base editor is ABE8.20-d, which comprises or consists essentially of the following sequence or a fragment thereof having adenosine deaminase activity:

ABE8.20-d
MSEVEFSHEYWMRHALTLAKRAWDEREVPVGAVLVHNNRVIGEGWNRPIG
RHDPTAHAEIMALRQGGLVMQNYRLIDATLYVTLEPCVMCAGAMIHSRIG
RVVFGARDAKTGAAGSLMDVLHHPGMNHRVEITEGILADECAALLSDFFR
MRRQEIKAQKKAQSSTDSGGSSGGSSGSETPGTSESATPESSGGSSGGSS
EVEFSHEYWMRHALTLAKRARDEREVPVGAVLVLNNRVIGEGWNRAIGLH
DPTAHAEIMALRQGGLVMQNYRLYDATLYSTFEPCVMCAGAMIHSRIGRV
VFGVRNAKTGAAGSLMDVLHHPGMNHRVEITEGILADECAALLCRFFRMP
RRVFNAQKKAQSSTDSGGSSGGSSGSETPGTSESATPESSGGSSGGSDKK
YSIGL [symbol] IGTNSVGWAVITDEYKVPSKKFKVLGNTDRHSIKKNLIGALLFD
SGETAEATRLKRTARRRYTRRKNRICYLQEIFSNEMAKVDDSFFHRLEES
FLVEEDKKHERHPIFGNIVDEVAYHEKYPTIYHLRKKLVDSTDKADLRLI
YLALAHMIKFRGHFLIEGDLNPDNSDVDKLFIQLVQTYNQLFEENPINAS
GVDAKAILSARLSKSRRLENLIAQLPGEKKNGLFGNLIALSLGLTPNFKS
NFDLAEDAKLQLSKDTYDDDLDNLLAQIGDQYADLFLAAKNLSDAILLSD
ILRVNTEITKAPLSASMIKRYDEHHQDLTLLKALVRQQLPEKYKEIFFDQ
SKNGYAGYIDGGASQEEFYKFIKPILEKMDGTEELLVKLNREDLLRKQRT
FDNGSIPHQIHLGELHAILRRQEDFYPFLKDNREKIEKILTFRIPYYVGP
LARGNSRFAWMTRKSEETITPWNFEEVVDKGASAQSFIERMTNFDKNLPN
EKVLPKHSLLYEYFTVYNELTKVKYVTEGMRKPAFLSGEQKKAIVDLLFK
TNRKVTVKQLKEDYFKKIECFDSVEISGVEDRFNASLGTYHDLLKIIKDK
DFLDNEENEDILEDIVLTLTLFEDREMIEERLKTYAHLFDDKVMKQLKRR
RYTGWGRLSRKLINGIRDKQSGKTILDFLKSDGFANRNFMQLIHDDSLTF
KEDIQKAQVSGQGDSLHEHIANLAGSPAIKKGILQTVKVVDELVKVMGRH
KPENIVIEMARENQTTOKGQKNSRERMKRIEEGIKELGSQILKEHPVENT
QLQNEKLYLYYLQNGRDMYVDQELDINRLSDYDVDHIVPQSFLKDDSIDN
KVLTRSDKNRGKSDNVPSEEVVKKMKNYWRQLLNAKLITQRKFDNLTKAE
RGGLSELDKAGFIKRQLVETRQITKHVAQILDSRMNTKYDENDKLIREVK
VITLKSKLVSDFRKDFQFYKVREINNYHHAHDAYLNAVVGTALIKKYPKL
ESEFVYGDYKVYDVRKMIAKSEQEIGKATAKYFFYSNIMNFFKTEITLAN
GEIRKRPLIETNGETGEIVWDKGRDFATVRKVLSMPQVNIVKKTEVQTGG
FSKESILPKRNSDKLIARKKDWDPKKYGGFDSPTVAYSVLVVAKVEKGKS
KKLKSVKELLGITIMERSSFEKNPIDFLEAKGYKEVKKDLIIKLPKYSLF
ELENGRKRMLASAGELQKGNELALPSKYVNFLYLASHYEKLKGSPEDNEQ
KQLFVEQHKHYLDEIIEQISEFSKRVILADANLDKVLSAYNKHRDKPIRE
QAENIIHLFTLTNLGAPAAFKYFDTTIDRKRYTSTKEVLDATLIHQSITG
LYETRIDLSQLGGDEGADKRTADGSEFESPKKKRKV*

[0552] In the above sequence, the plain text denotes an adenosine deaminase sequence, bold sequence indicates sequence derived from Cas9, the italicized sequence denotes a linker sequence, underlined sequence denotes a bipartite nuclear localization sequence, and double underlined sequence indicates mutations.

[0553] In some embodiments, an ABE8 of the disclosure is selected from the following sequences:

01. monoABE8.1_bpNLS + Y147T
MSEVEFSHEYWMRHALTLAKRARDEREVPVGAVLVLNNRVIGEGWNRAIGLHDPTAHAEIMALRQ
GGLVMQNYRLIDATLYVTFEPCVMCAGAMIHSRIGRVVFGVRNAKTGAAGSLMDVLHYPGMNHRV
EITEGILADECAALLCTFFRMPRQVFNAQKKAQSSTDSGGSSGGSSGSETPGTSESATPESSGGS
SGGSDKKYSIGLAIGTNSVGWAVITDEYKVPSKKFKVLGNTDRHSIKKNLIGALLFDSGETAEAT
RLKRTARRRYTRRKNRICYLQEIFSNEMAKVDDSFFHRLEESFLVEEDKKHERHPIFGNIVDEVA
YHEKYPTIYHLRKKLVDSTDKADLRLIYLALAHMIKFRGHFLIEGDLNPDNSDVDKLFIQLVQTY
NQLFEENPINASGVDAKAILSARLSKSRRLENLIAQLPGEKKNGLFGNLIALSLGLTPNFKSNFD
LAEDAKLQLSKDTYDDDLDNLLAQIGDQYADLFLAAKNLSDAILLSDILRVNTEITKAPLSASMI
KRYDEHHQDLTLLKALVRQQLPEKYKEIFFDQSKNGYAGYIDGGASQEEFYKFIKPILEKMDGTE
ELLVKLNREDLLRKQRTFDNGSIPHQIHLGELHAILRRQEDFYPFLKDNREKIEKILTFRIPYYV
GPLARGNSRFAWMTRKSEETITPWNFEEVVDKGASAQSFIERMTNFDKNLPNEKVLPKHSLLYEY
FTVYNELTKVKYVTEGMRKPAFLSGEQKKAIVDLLFKTNRKVTVKQLKEDYFKKIECFDSVEISG
VEDRFNASLGTYHDLLKIIKDKDFLDNEENEDILEDIVLTLTLFEDREMIEERLKTYAHLFDDKV
MKQLKRRRYTGWGRLSRKLINGIRDKQSGKTILDFLKSDGFANRNFMQLIHDDSLTFKEDIQKAQ
VSGQGDSLHEHIANLAGSPAIKKGILQTVKVVDELVKVMGRHKPENIVIEMARENQTTQKGQKNS
RERMKRIEEGIKELGSQILKEHPVENTQLQNEKLYLYYLQNGRDMYVDQELDINRLSDYDVDHIV
PQSFLKDDSIDNKVLTRSDKNRGKSDNVPSEEVVKKMKNYWRQLLNAKLITQRKFDNLTKAERGG
LSELDKAGFIKRQLVETRQITKHVAQILDSRMNTKYDENDKLIREVKVITLKSKLVSDFRKDFQF
YKVREINNYHHAHDAYLNAVVGTALIKKYPKLESEFVYGDYKVYDVRKMIAKSEQEIGKATAKYF
FYSNIMNFFKTEITLANGEIRKRPLIETNGETGEIVWDKGRDFATVRKVLSMPQVNIVKKTEVQT
GGFSKESILPKRNSDKLIARKKDWDPKKYGGFVSPTVAYSVLVVAKVEKGKSKKLKSVKELLGIT
IMERSSFEKNPIDFLEAKGYKEVKKDLIIKLPKYSLFELENGRKRMLASARELQKGNELALPSKY
VNFLYLASHYEKLKGSPEDNEQKQLFVEQHKHYLDEIIEQISEFSKRVILADANLDKVLSAYNKH
RDKPIREQAENIIHLFTLTNLGAPAAFKYFDTTIDRKQYRSTKEVLDATLIHQSITGLYETRIDL
SQLGGDEGADKRTADGSEFESPKKKRKV
02. monoABE8.1_bpNLS + Y147R
MSEVEFSHEYWMRHALTLAKRARDEREVPVGAVLVLNNRVIGEGWNRAIGLHDPTAHAEIMALRQ
GGLVMQNYRLIDATLYVTFEPCVMCAGAMIHSRIGRVVFGVRNAKTGAAGSLMDVLHYPGMNHRV
EITEGILADECAALLCRFFRMPRQVFNAQKKAQSSTDSGGSSGGSSGSETPGTSESATPESSGGS
SGGSDKKYSIGLAIGTNSVGWAVITDEYKVPSKKFKVLGNTDRHSIKKNLIGALLFDSGETAEAT
RLKRTARRRYTRRKNRICYLQEIFSNEMAKVDDSFFHRLEESFLVEEDKKHERHPIFGNIVDEVA
YHEKYPTIYHLRKKLVDSTDKADLRLIYLALAHMIKFRGHFLIEGDLNPDNSDVDKLFIQLVQTY
NQLFEENPINASGVDAKAILSARLSKSRRLENLIAQLPGEKKNGLFGNLIALSLGLTPNFKSNFD
LAEDAKLQLSKDTYDDDLDNLLAQIGDQYADLFLAAKNLSDAILLSDILRVNTEITKAPLSASMI
KRYDEHHQDLTLLKALVRQQLPEKYKEIFFDQSKNGYAGYIDGGASQEEFYKFIKPILEKMDGTE
ELLVKLNREDLLRKQRTFDNGSIPHQIHLGELHAILRRQEDFYPFLKDNREKIEKILTFRIPYYV
GPLARGNSRFAWMTRKSEETITPWNFEEVVDKGASAQSFIERMTNFDKNLPNEKVLPKHSLLYEY
FTVYNELTKVKYVTEGMRKPAFLSGEQKKAIVDLLFKTNRKVTVKQLKEDYFKKIECFDSVEISG
VEDRFNASLGTYHDLLKIIKDKDFLDNEENEDILEDIVLTLTLFEDREMIEERLKTYAHLFDDKV
MKQLKRRRYTGWGRLSRKLINGIRDKQSGKTILDFLKSDGFANRNFMQLIHDDSLTFKEDIQKAQ
VSGQGDSLHEHIANLAGSPAIKKGILQTVKVVDELVKVMGRHKPENIVIEMARENQTTQKGQKNS
RERMKRIEEGIKELGSQILKEHPVENTQLQNEKLYLYYLQNGRDMYVDQELDINRLSDYDVDHIV
PQSFLKDDSIDNKVLTRSDKNRGKSDNVPSEEVVKKMKNYWRQLLNAKLITQRKFDNLTKAERGG
LSELDKAGETKRQLVETRQITKHVAQILDSRMNTKYDENDKLIREVKVITLKSKLVSDFRKDFQE
YKVREINNYHHAHDAYLNAVVGTALIKKYPKLESEFVYGDYKVYDVRKMIAKSEQEIGKATAKYE
FYSNIMNFFKTEITLANGEIRKRPLIETNGETGEIVWDKGRDFATVRKVLSMPQVNIVKKTEVQT
GGFSKESILPKRNSDKLIARKKDWDPKKYGGFVSPTVAYSVLVVAKVEKGKSKKLKSVKELLGIT
IMERSSFEKNPIDFLEAKGYKEVKKDLIIKLPKYSLFELENGRKRMLASARELQKGNELALPSKY
VNFLYLASHYEKLKGSPEDNEQKQLFVEQHKHYLDEIIEQISEFSKRVILADANLDKVLSAYNKH
RDKPIREQAENIIHLFTLTNLGAPAAFKYFDTTIDRKQYRSTKEVLDATLIHQSITGLYETRIDL
SQLGGDEGADKRTADGSEFESPKKKRKV
03. monoABE8.1_bpNLS + Q154S
MSEVEFSHEYWMRHALTLAKRARDEREVPVGAVLVLNNRVIGEGWNRAIGLHDPTAHAEIMALRQ
GGLVMQNYRLIDATLYVTFEPCVMCAGAMIHSRIGRVVFGVRNAKTGAAGSLMDVLHYPGMNHRV
EITEGILADECAALLCYFFRMPRSVFNAQKKAQSSTDSGGSSGGSSGSETPGTSESATPESSGGS
SGGSDKKYSIGLAIGTNSVGWAVITDEYKVPSKKFKVLGNTDRHSIKKNLIGALLFDSGETAEAT
RLKRTARRRYTRRKNRICYLQEIFSNEMAKVDDSFFHRLEESFLVEEDKKHERHPIFGNIVDEVA
YHEKYPTIYHLRKKLVDSTDKADLRLIYLALAHMIKFRGHFLIEGDLNPDNSDVDKLFIQLVQTY
NQLFEENPINASGVDAKAILSARLSKSRRLENLIAQLPGEKKNGLFGNLIALSLGLTPNFKSNFD
LAEDAKLQLSKDTYDDDLDNLLAQIGDQYADLFLAAKNLSDAILLSDILRVNTEITKAPLSASMI
KRYDEHHQDLTLLKALVRQQLPEKYKEIFFDQSKNGYAGYIDGGASQEEFYKFIKPILEKMDGTE
ELLVKLNREDLLRKQRTFDNGSIPHQIHLGELHAILRRQEDFYPFLKDNREKIEKILTFRIPYYV
GPLARGNSRFAWMTRKSEETITPWNFEEVVDKGASAQSFIERMTNFDKNLPNEKVLPKHSLLYEY
FTVYNELTKVKYVTEGMRKPAFLSGEQKKAIVDLLFKTNRKVTVKQLKEDYFKKIECFDSVEISG
VEDRFNASLGTYHDLLKIIKDKDFLDNEENEDILEDIVLTLTLFEDREMIEERLKTYAHLFDDKV
MKQLKRRRYTGWGRLSRKLINGIRDKQSGKTILDFLKSDGFANRNFMQLIHDDSLTFKEDIQKAQ
VSGQGDSLHEHIANLAGSPAIKKGILQTVKVVDELVKVMGRHKPENIVIEMARENQTTQKGQKNS
RERMKRIEEGIKELGSQILKEHPVENTQLQNEKLYLYYLQNGRDMYVDQELDINRLSDYDVDHIV
PQSFLKDDSIDNKVLTRSDKNRGKSDNVPSEEVVKKMKNYWRQLLNAKLITQRKFDNLTKAERGG
LSELDKAGFIKRQLVETRQITKHVAQILDSRMNTKYDENDKLIREVKVITLKSKLVSDFRKDFQF
YKVREINNYHHAHDAYLNAVVGTALIKKYPKLESEFVYGDYKVYDVRKMIAKSEQEIGKATAKYF
FYSNIMNFFKTEITLANGEIRKRPLIETNGETGEIVWDKGRDFATVRKVLSMPQVNIVKKTEVQT
GGFSKESILPKRNSDKLIARKKDWDPKKYGGFVSPTVAYSVLVVAKVEKGKSKKLKSVKELLGIT
IMERSSFEKNPIDFLEAKGYKEVKKDLIIKLPKYSLFELENGRKRMLASARELQKGNELALPSKY
VNFLYLASHYEKLKGSPEDNEQKQLFVEQHKHYLDEIIEQISEFSKRVILADANLDKVLSAYNKH
RDKPIREQAENIIHLFTLTNLGAPAAFKYFDTTIDRKQYRSTKEVLDATLIHQSITGLYETRIDL
SQLGGDEGADKRTADGSEFESPKKKRKV
04. monoABE8.1_bpNLS + Y123H
MSEVEFSHEYWMRHALTLAKRARDEREVPVGAVLVLNNRVIGEGWNRAIGLHDPTAHAEIMALRQ
GGLVMQNYRLIDATLYVTFEPCVMCAGAMIHSRIGRVVFGVRNAKTGAAGSLMDVLHHPGMNHRV
EITEGILADECAALLCYFFRMPRQVFNAQKKAQSSTDSGGSSGGSSGSETPGTSESATPESSGGS
SGGSDKKYSIGLAIGTNSVGWAVITDEYKVPSKKFKVLGNTDRHSIKKNLIGALLFDSGETAEAT
RLKRTARRRYTRRKNRICYLQEIFSNEMAKVDDSFFHRLEESFLVEEDKKHERHPIFGNIVDEVA
YHEKYPTIYHLRKKLVDSTDKADLRLIYLALAHMIKFRGHFLIEGDLNPDNSDVDKLFIQLVQTY
NQLFEENPINASGVDAKAILSARLSKSRRLENLIAQLPGEKKNGLFGNLIALSLGLTPNFKSNFD
LAEDAKLQLSKDTYDDDLDNLLAQIGDQYADLFLAAKNLSDAILLSDILRVNTEITKAPLSASMI
KRYDEHHQDLTLLKALVRQQLPEKYKEIFFDQSKNGYAGYIDGGASQEEFYKFIKPILEKMDGTE
ELLVKLNREDLLRKQRTFDNGSIPHQIHLGELHAILRRQEDFYPFLKDNREKIEKILTFRIPYYV
GPLARGNSRFAWMTRKSEETITPWNFEEVVDKGASAQSFIERMTNFDKNLPNEKVLPKHSLLYEY
FTVYNELTKVKYVTEGMRKPAFLSGEQKKAIVDLLFKTNRKVTVKQLKEDYFKKIECFDSVEISG
VEDRFNASLGTYHDLLKIIKDKDFLDNEENEDILEDIVLTLTLFEDREMIEERLKTYAHLFDDKV
MKQLKRRRYTGWGRLSRKLINGIRDKQSGKTILDFLKSDGFANRNFMQLIHDDSLTFKEDIQKAQ
VSGQGDSLHEHIANLAGSPAIKKGILQTVKVVDELVKVMGRHKPENIVIEMARENQTTQKGQKNS
RERMKRIEEGIKELGSQILKEHPVENTQLQNEKLYLYYLQNGRDMYVDQELDINRLSDYDVDHIV
PQSFLKDDSIDNKVLTRSDKNRGKSDNVPSEEVVKKMKNYWRQLLNAKLITQRKFDNLTKAERGG
LSELDKAGFIKRQLVETRQITKHVAQILDSRMNTKYDENDKLIREVKVITLKSKLVSDFRKDFQF
YKVREINNYHHAHDAYLNAVVGTALIKKYPKLESEFVYGDYKVYDVRKMIAKSEQEIGKATAKYF
FYSNIMNFFKTEITLANGEIRKRPLIETNGETGEIVWDKGRDFATVRKVLSMPQVNIVKKTEVQT
GGFSKESILPKRNSDKLIARKKDVVDPKKYGGFVSPTVAYSVLWAKVEKGKSKKLKSVKELLGIT
IMERSSFEKNPIDFLEAKGYKEVKKDLIIKLPKYSLFELENGRKRMLASARELQKGNELALPSKY
VNFLYLASHYEKLKGSPEDNEQKQLFVEQHKHYLDEIIEQISEFSKRVILADANLDKVLSAYNKH
RDKPIREQAENIIHLFTLTNLGAPAAFKYFDTTIDRKQYRSTKEVLDATLIHQSITGLYETRIDL
SQLGGDEGADKRTADGSEFESPKKKRKV
05. monoABE8.1_bpNLS + V82S
MSEVEFSHEYWMRHALTLAKRARDEREVPVGAVLVLNNRVIGEGWNRAIGLHDPTAHAEIMALRQ
GGLVMQNYRLIDATLYSTFEPCVMCAGAMIHSRIGRVVFGVRNAKTGAAGSLMDVLHYPGMNHRV
EITEGILADECAALLCYFFRMPRQVFNAQKKAQSSTDSGGSSGGSSGSETPGTSESATPESSGGS
SGGSDKKYSIGLAIGTNSVGWAVITDEYKVPSKKFKVLGNTDRHSIKKNLIGALLFDSGETAEAT
RLKRTARRRYTRRKNRICYLQEIFSNEMAKVDDSFFHRLEESFLVEEDKKHERHPIFGNIVDEVA
YHEKYPTIYHLRKKLVDSTDKADLRLIYLALAHMIKFRGHFLIEGDLNPDNSDVDKLFIQLVQTY
NQLFEENPINASGVDAKAILSARLSKSRRLENLIAQLPGEKKNGLFGNLIALSLGLTPNFKSNFD
LAEDAKLQLSKDTYDDDLDNLLAQIGDQYADLFLAAKNLSDAILLSDILRVNTEITKAPLSASMI
KRYDEHHQDLTLLKALVRQQLPEKYKEIFFDQSKNGYAGYIDGGASQEEFYKFIKPILEKMDGTE
ELLVKLNREDLLRKQRTFDNGSIPHQIHLGELHAILRRQEDFYPFLKDNREKIEKILTFRIPYYV
GPLARGNSRFAWMTRKSEETITPWNFEEVVDKGASAQSFIERMTNFDKNLPNEKVLPKHSLLYEY
FTVYNELTKVKYVTEGMRKPAFLSGEQKKAIVDLLFKTNRKVTVKQLKEDYFKKIECFDSVEISG
VEDRFNASLGTYHDLLKIIKDKDFLDNEENEDILEDIVLTLTLFEDREMIEERLKTYAHLFDDKV
MKQLKRRRYTGWGRLSRKLINGIRDKQSGKTILDFLKSDGFANRNFMQLIHDDSLTFKEDIQKAQ
VSGQGDSLHEHIANLAGSPAIKKGILQTVKVVDELVKVMGRHKPENIVIEMARENQTTQKGQKNS
RERMKRIEEGIKELGSQILKEHPVENTQLQNEKLYLYYLQNGRDMYVDQELDINRLSDYDVDHIV
PQSFLKDDSIDNKVLTRSDKNRGKSDNVPSEEVVKKMKNYWRQLLNAKLITQRKFDNLTKAERGG
LSELDKAGFIKRQLVETRQITKHVAQILDSRMNTKYDENDKLIREVKVITLKSKLVSDFRKDFQF
YKVREINNYHHAHDAYLNAVVGTALIKKYPKLESEFVYGDYKVYDVRKMIAKSEQEIGKATAKYF
FYSNIMNFFKTEITLANGEIRKRPLIETNGETGEIVWDKGRDFATVRKVLSMPQVNIVKKTEVQT
GGFSKESILPKRNSDKLIARKKDVVDPKKYGGFVSPTVAYSVLWAKVEKGKSKKLKSVKELLGIT
IMERSSFEKNPIDFLEAKGYKEVKKDLIIKLPKYSLFELENGRKRMLASARELQKGNELALPSKY
VNFLYLASHYEKLKGSPEDNEQKQLFVEQHKHYLDEIIEQISEFSKRVILADANLDKVLSAYNKH
RDKPIREQAENIIHLFTLTNLGAPAAFKYFDTTIDRKQYRSTKEVLDATLIHQSITGLYETRIDL
SQLGGDEGADKRTADGSEFESPKKKRKV
06. monoABE8.1_bpNLS + T166R
MSEVEFSHEYWMRHALTLAKRARDEREVPVGAVLVLNNRVIGEGWNRAIGLHDPTAHAEIMALRQ
GGLVMQNYRLIDATLYVTFEPCVMCAGAMIHSRIGRVVFGVRNAKTGAAGSLMDVLHYPGMNHRV
EITEGILADECAALLCYFFRMPRQVFNAQKKAQSSRDSGGSSGGSSGSETPGTSESATPESSGGS
SGGSDKKYSIGLAIGTNSVGWAVITDEYKVPSKKFKVLGNTDRHSIKKNLIGALLFDSGETAEAT
RLKRTARRRYTRRKNRICYLQEIFSNEMAKVDDSFFHRLEESFLVEEDKKHERHPIFGNIVDEVA
YHEKYPTIYHLRKKLVDSTDKADLRLIYLALAHMIKFRGHFLIEGDLNPDNSDVDKLFIQLVQTY
NQLFEENPINASGVDAKAILSARLSKSRRLENLIAQLPGEKKNGLFGNLIALSLGLTPNFKSNFD
LAEDAKLQLSKDTYDDDLDNLLAQIGDQYADLFLAAKNLSDAILLSDILRVNTEITKAPLSASMI
KRYDEHHQDLTLLKALVRQQLPEKYKEIFFDQSKNGYAGYIDGGASQEEFYKFIKPILEKMDGTE
ELLVKLNREDLLRKQRTFDNGSIPHQIHLGELHAILRRQEDFYPFLKDNREKIEKILTFRIPYYV
GPLARGNSRFAWMTRKSEETITPWNFEEVVDKGASAQSFIERMTNFDKNLPNEKVLPKHSLLYEY
FTVYNELTKVKYVTEGMRKPAFLSGEQKKAIVDLLFKTNRKVTVKQLKEDYFKKIECFDSVEISG
VEDRFNASLGTYHDLLKIIKDKDFLDNEENEDILEDIVLTLTLFEDREMIEERLKTYAHLFDDKV
MKQLKRRRYTGWGRLSRKLINGIRDKQSGKTILDFLKSDGFANRNFMQLIHDDSLTFKEDIQKAQ
VSGQGDSLHEHIANLAGSPAIKKGILQTVKVVDELVKVMGRHKPENIVIEMARENQTTQKGQKNS
RERMKRIEEGIKELGSQILKEHPVENTQLQNEKLYLYYLQNGRDMYVDQELDINRLSDYDVDHIV
PQSFLKDDSIDNKVLTRSDKNRGKSDNVPSEEVVKKMKNYWRQLLNAKLITQRKFDNLTKAERGG
LSELDKAGFIKRQLVETRQITKHVAQILDSRMNTKYDENDKLIREVKVITLKSKLVSDFRKDFQF
YKVREINNYHHAHDAYLNAVVGTALIKKYPKLESEFVYGDYKVYDVRKMIAKSEQEIGKATAKYE
FYSNIMNFFKTEITLANGEIRKRPLIETNGETGEIVWDKGRDFATVRKVLSMPQVNIVKKTEVQT
GGFSKESILPKRNSDKLIARKKDWDPKKYGGFVSPTVAYSVLVVAKVEKGKSKKLKSVKELLGIT
IMERSSFEKNPIDFLEAKGYKEVKKDLIIKLPKYSLFELENGRKRMLASARELQKGNELALPSKY
VNFLYLASHYEKLKGSPEDNEQKQLFVEQHKHYLDEIIEQISEFSKRVILADANLDKVLSAYNKH
RDKPIREQAENIIHLFTLTNLGAPAAFKYFDTTIDRKQYRSTKEVLDATLIHQSITGLYETRIDL
SQLGGDEGADKRTADGSEFESPKKKRKV
07. monoABE8.1_bpNLS + Q154R
MSEVEFSHEYWMRHALTLAKRARDEREVPVGAVLVLNNRVIGEGWNRAIGLHDPTAHAEIMALRQ
GGLVMQNYRLIDATLYVTFEPCVMCAGAMIHSRIGRVVFGVRNAKTGAAGSLMDVLHYPGMNHRV
EITEGILADECAALLCYFFRMPRRVFNAQKKAQSSTDSGGSSGGSSGSETPGTSESATPESSGGS
SGGSDKKYSIGLAIGTNSVGWAVITDEYKVPSKKFKVLGNTDRHSIKKNLIGALLFDSGETAEAT
RLKRTARRRYTRRKNRICYLQEIFSNEMAKVDDSFFHRLEESFLVEEDKKHERHPIFGNIVDEVA
YHEKYPTIYHLRKKLVDSTDKADLRLIYLALAHMIKFRGHFLIEGDLNPDNSDVDKLFIQLVQTY
NQLFEENPINASGVDAKAILSARLSKSRRLENLIAQLPGEKKNGLFGNLIALSLGLTPNFKSNFD
LAEDAKLQLSKDTYDDDLDNLLAQIGDQYADLFLAAKNLSDAILLSDILRVNTEITKAPLSASMI
KRYDEHHQDLTLLKALVRQQLPEKYKEIFFDQSKNGYAGYIDGGASQEEFYKFIKPILEKMDGTE
ELLVKLNREDLLRKQRTFDNGSIPHQIHLGELHAILRRQEDFYPFLKDNREKIEKILTFRIPYYV
GPLARGNSRFAWMTRKSEETITPWNFEEVVDKGASAQSFIERMTNFDKNLPNEKVLPKHSLLYEY
FTVYNELTKVKYVTEGMRKPAFLSGEQKKAIVDLLFKTNRKVTVKQLKEDYFKKIECFDSVEISG
VEDRFNASLGTYHDLLKIIKDKDFLDNEENEDILEDIVLTLTLFEDREMIEERLKTYAHLFDDKV
MKQLKRRRYTGWGRLSRKLINGIRDKQSGKTILDFLKSDGFANRNFMQLIHDDSLTFKEDIQKAQ
VSGQGDSLHEHIANLAGSPAIKKGILQTVKVVDELVKVMGRHKPENIVIEMARENQTTQKGQKNS
RERMKRIEEGIKELGSQILKEHPVENTQLQNEKLYLYYLQNGRDMYVDQELDINRLSDYDVDHIV
PQSFLKDDSIDNKVLTRSDKNRGKSDNVPSEEVVKKMKNYWRQLLNAKLITQRKFDNLTKAERGG
LSELDKAGFIKRQLVETRQITKHVAQILDSRMNTKYDENDKLIREVKVITLKSKLVSDFRKDFQF
YKVREINNYHHAHDAYLNAVVGTALIKKYPKLESEFVYGDYKVYDVRKMIAKSEQEIGKATAKYF
FYSNIMNFFKTEITLANGEIRKRPLIETNGETGEIVWDKGRDFATVRKVLSMPQVNIVKKTEVQT
GGFSKESILPKRNSDKLIARKKDVVDPKKYGGFVSPTVAYSVLWAKVEKGKSKKLKSVKELLGIT
IMERSSFEKNPIDFLEAKGYKEVKKDLIIKLPKYSLFELENGRKRMLASARELQKGNELALPSKY
VNFLYLASHYEKLKGSPEDNEQKQLFVEQHKHYLDEIIEQISEFSKRVILADANLDKVLSAYNKH
RDKPIREQAENIIHLFTLTNLGAPAAFKYFDTTIDRKQYRSTKEVLDATLIHQSITGLYETRIDL
SQLGGDEGADKRTADGSEFESPKKKRKV
08. monoABE8.1_bpNLS + Y147R Q154R Y123H
MSEVEFSHEYWMRHALTLAKRARDEREVPVGAVLVLNNRVIGEGWNRAIGLHDPTAHAEIMALRQ
GGLVMQNYRLIDATLYVTFEPCVMCAGAMIHSRIGRVVFGVRNAKTGAAGSLMDVLHHPGMNHRV
EITEGILADECAALLCRFFRMPRRVFNAQKKAQSSTDSGGSSGGSSGSETPGTSESATPESSGGS
SGGSDKKYSIGLAIGTNSVGWAVITDEYKVPSKKFKVLGNTDRHSIKKNLIGALLFDSGETAEAT
RLKRTARRRYTRRKNRICYLQEIFSNEMAKVDDSFFHRLEESFLVEEDKKHERHPIFGNIVDEVA
YHEKYPTIYHLRKKLVDSTDKADLRLIYLALAHMIKFRGHFLIEGDLNPDNSDVDKLFIQLVQTY
NQLFEENPINASGVDAKAILSARLSKSRRLENLIAQLPGEKKNGLFGNLIALSLGLTPNFKSNFD
LAEDAKLQLSKDTYDDDLDNLLAQIGDQYADLFLAAKNLSDAILLSDILRVNTEITKAPLSASMI
KRYDEHHQDLTLLKALVRQQLPEKYKEIFFDQSKNGYAGYIDGGASQEEFYKFIKPILEKMDGTE
ELLVKLNREDLLRKQRTFDNGSIPHQIHLGELHAILRRQEDFYPFLKDNREKIEKILTFRIPYYV
GPLARGNSRFAWMTRKSEETITPWNFEEVVDKGASAQSFIERMTNFDKNLPNEKVLPKHSLLYEY
FTVYNELTKVKYVTEGMRKPAFLSGEQKKAIVDLLFKTNRKVTVKQLKEDYFKKIECFDSVEISG
VEDRFNASLGTYHDLLKIIKDKDFLDNEENEDILEDIVLTLTLFEDREMIEERLKTYAHLFDDKV
MKQLKRRRYTGWGRLSRKLINGIRDKQSGKTILDFLKSDGFANRNFMQLIHDDSLTFKEDIQKAQ
VSGQGDSLHEHIANLAGSPAIKKGILQTVKVVDELVKVMGRHKPENIVIEMARENQTTQKGQKNS
RERMKRIEEGIKELGSQILKEHPVENTQLQNEKLYLYYLQNGRDMYVDQELDINRLSDYDVDHIV
PQSFLKDDSIDNKVLTRSDKNRGKSDNVPSEEVVKKMKNYWRQLLNAKLITQRKFDNLTKAERGG
LSELDKAGFIKRQLVETRQITKHVAQILDSRMNTKYDENDKLIREVKVITLKSKLVSDFRKDFQF
YKVREINNYHHAHDAYLNAVVGTALIKKYPKLESEFVYGDYKVYDVRKMIAKSEQEIGKATAKYF
FYSNIMNFFKTEITLANGEIRKRPLIETNGETGEIVWDKGRDFATVRKVLSMPQVNIVKKTEVQT
GGFSKESILPKRNSDKLIARKKDVVDPKKYGGFVSPTVAYSVLWAKVEKGKSKKLKSVKELLGIT
IMERSSFEKNPIDFLEAKGYKEVKKDLIIKLPKYSLFELENGRKRMLASARELQKGNELALPSKY
VNFLYLASHYEKLKGSPEDNEQKQLFVEQHKHYLDEIIEQISEFSKRVILADANLDKVLSAYNKH
RDKPIREQAENIIHLFTLTNLGAPAAFKYFDTTIDRKQYRSTKEVLDATLIHQSITGLYETRIDL
SQLGGDEGADKRTADGSEFESPKKKRKV
09. monoABE8.1_bpNLS + Y147R_Q154R_I76Y
MSEVEFSHEYWMRHALTLAKRARDEREVPVGAVLVLNNRVIGEGWNRAIGLHDPTAHAEIMALRQ
GGLVMQNYRLYDATLYVTFEPCVMCAGAMIHSRIGRVVFGVRNAKTGAAGSLMDVLHYPGMNHRV
EITEGILADECAALLCRFFRMPRRVFNAQKKAQSSTDSGGSSGGSSGSETPGTSESATPESSGGS
SGGSDKKYSIGLAIGTNSVGWAVITDEYKVPSKKFKVLGNTDRHSIKKNLIGALLFDSGETAEAT
RLKRTARRRYTRRKNRICYLQEIFSNEMAKVDDSFFHRLEESFLVEEDKKHERHPIFGNIVDEVA
YHEKYPTIYHLRKKLVDSTDKADLRLIYLALAHMIKFRGHELIEGDLNPDNSDVDKLFIQLVQTY
NQLFEENPINASGVDAKAILSARLSKSRRLENLIAQLPGEKKNGLFGNLIALSLGLTPNFKSNFD
LAEDAKLQLSKDTYDDDLDNLLAQIGDQYADLFLAAKNLSDAILLSDILRVNTEITKAPLSASMI
KRYDEHHQDLTLLKALVRQQLPEKYKEIFFDQSKNGYAGYIDGGASQEEFYKFIKPILEKMDGTE
ELLVKLNREDLLRKQRTFDNGSIPHQIHLGELHAILRRQEDFYPFLKDNREKIEKILTFRIPYYV
GPLARGNSRFAWMTRKSEETITPWNFEEVVDKGASAQSFIERMTNFDKNLPNEKVLPKHSLLYEY
FTVYNELTKVKYVTEGMRKPAFLSGEQKKAIVDLLFKTNRKVTVKQLKEDYFKKIECFDSVEISG
VEDRFNASLGTYHDLLKIIKDKDFLDNEENEDILEDIVLTLTLFEDREMIEERLKTYAHLFDDKV
MKQLKRRRYTGWGRLSRKLINGIRDKQSGKTILDFLKSDGFANRNFMQLIHDDSLTFKEDIQKAQ
VSGQGDSLHEHIANLAGSPAIKKGILQTVKVVDELVKVMGRHKPENIVIEMARENQTTQKGQKNS
RERMKRIEEGIKELGSQILKEHPVENTQLQNEKLYLYYLQNGRDMYVDQELDINRLSDYDVDHIV
PQSFLKDDSIDNKVLTRSDKNRGKSDNVPSEEVVKKMKNYWRQLLNAKLITQRKFDNLTKAERGG
LSELDKAGFIKRQLVETRQITKHVAQILDSRMNTKYDENDKLIREVKVITLKSKLVSDFRKDFQF
YKVREINNYHHAHDAYLNAVVGTALIKKYPKLESEFVYGDYKVYDVRKMIAKSEQEIGKATAKYF
FYSNIMNFFKTEITLANGEIRKRPLIETNGETGEIVWDKGRDFATVRKVLSMPQVNIVKKTEVQT
GGFSKESILPKRNSDKLIARKKDVVDPKKYGGFVSPTVAYSVLWAKVEKGKSKKLKSVKELLGIT
IMERSSFEKNPIDFLEAKGYKEVKKDLIIKLPKYSLFELENGRKRMLASARELQKGNELALPSKY
VNFLYLASHYEKLKGSPEDNEQKQLFVEQHKHYLDEIIEQISEFSKRVILADANLDKVLSAYNKH
RDKPIREQAENIIHLFTLTNLGAPAAFKYFDTTIDRKQYRSTKEVLDATLIHQSITGLYETRIDL
SQLGGDEGADKRTADGSEFESPKKKRKV
10. monoABE8.1_bpNLS + Y147R_Q154R_T166R
MSEVEFSHEYWMRHALTLAKRARDEREVPVGAVLVLNNRVIGEGWNRAIGLHDPTAHAEIMALRQ
GGLVMQNYRLIDATLYVTFEPCVMCAGAMIHSRIGRVVFGVRNAKTGAAGSLMDVLHYPGMNHRV
EITEGILADECAALLCRFFRMPRRVFNAQKKAQSSRDSGGSSGGSSGSETPGTSESATPESSGGS
SGGSDKKYSIGLAIGTNSVGWAVITDEYKVPSKKFKVLGNTDRHSIKKNLIGALLFDSGETAEAT
RLKRTARRRYTRRKNRICYLQEIFSNEMAKVDDSFFHRLEESFLVEEDKKHERHPIFGNIVDEVA
YHEKYPTIYHLRKKLVDSTDKADLRLIYLALAHMIKFRGHFLIEGDLNPDNSDVDKLFIQLVQTY
NQLFEENPINASGVDAKAILSARLSKSRRLENLIAQLPGEKKNGLFGNLIALSLGLTPNFKSNFD
LAEDAKLQLSKDTYDDDLDNLLAQIGDQYADLFLAAKNLSDAILLSDILRVNTEITKAPLSASMI
KRYDEHHQDLTLLKALVRQQLPEKYKEIFFDQSKNGYAGYIDGGASQEEFYKFIKPILEKMDGTE
ELLVKLNREDLLRKQRTFDNGSIPHQIHLGELHAILRRQEDFYPFLKDNREKIEKILTFRIPYYV
GPLARGNSRFAWMTRKSEETITPWNFEEVVDKGASAQSFIERMTNFDKNLPNEKVLPKHSLLYEY
FTVYNELTKVKYVTEGMRKPAFLSGEQKKAIVDLLFKTNRKVTVKQLKEDYFKKIECFDSVEISG
VEDRFNASLGTYHDLLKIIKDKDFLDNEENEDILEDIVLTLTLFEDREMIEERLKTYAHLFDDKV
MKQLKRRRYTGWGRLSRKLINGIRDKQSGKTILDELKSDGFANRNEMQLIHDDSLTFKEDIQKAQ
VSGQGDSLHEHIANLAGSPAIKKGILQTVKVVDELVKVMGRHKPENIVIEMARENQTTQKGQKNS
RERMKRIEEGIKELGSQILKEHPVENTQLQNEKLYLYYLQNGRDMYVDQELDINRLSDYDVDHIV
PQSFLKDDSIDNKVLTRSDKNRGKSDNVPSEEVVKKMKNYWRQLLNAKLITQRKFDNLTKAERGG
LSELDKAGFIKRQLVETRQITKHVAQILDSRMNTKYDENDKLIREVKVITLKSKLVSDFRKDFQF
YKVREINNYHHAHDAYLNAVVGTALIKKYPKLESEFVYGDYKVYDVRKMIAKSEQEIGKATAKYE
FYSNIMNFFKTEITLANGEIRKRPLIETNGETGEIVWDKGRDFATVRKVLSMPQVNIVKKTEVQT
GGFSKESILPKRNSDKLIARKKDWDPKKYGGFVSPTVAYSVLVVAKVEKGKSKKLKSVKELLGIT
IMERSSFEKNPIDFLEAKGYKEVKKDLIIKLPKYSLFELENGRKRMLASARELQKGNELALPSKY
VNFLYLASHYEKLKGSPEDNEQKQLFVEQHKHYLDEIIEQISEFSKRVILADANLDKVLSAYNKH
RDKPIREQAENIIHLFTLTNLGAPAAFKYFDTTIDRKQYRSTKEVLDATLIHQSITGLYETRIDL
SQLGGDEGADKRTADGSEFESPKKKRKV
11. monoABE8.1_bpNLS + Y147T_Q154R
MSEVEFSHEYWMRHALTLAKRARDEREVPVGAVLVLNNRVIGEGWNRAIGLHDPTAHAEIMALRQ
GGLVMQNYRLIDATLYVTFEPCVMCAGAMIHSRIGRVVFGVRNAKTGAAGSLMDVLHYPGMNHRV
EITEGILADECAALLCTFFRMPRRVFNAQKKAQSSTDSGGSSGGSSGSETPGTSESATPESSGGS
SGGSDKKYSIGLAIGTNSVGWAVITDEYKVPSKKFKVLGNTDRHSIKKNLIGALLFDSGETAEAT
RLKRTARRRYTRRKNRICYLQEIFSNEMAKVDDSFFHRLEESFLVEEDKKHERHPIFGNIVDEVA
YHEKYPTIYHLRKKLVDSTDKADLRLIYLALAHMIKFRGHFLIEGDLNPDNSDVDKLFIQLVQTY
NQLFEENPINASGVDAKAILSARLSKSRRLENLIAQLPGEKKNGLFGNLIALSLGLTPNFKSNFD
LAEDAKLQLSKDTYDDDLDNLLAQIGDQYADLFLAAKNLSDAILLSDILRVNTEITKAPLSASMI
KRYDEHHQDLTLLKALVRQQLPEKYKEIFFDQSKNGYAGYIDGGASQEEFYKFIKPILEKMDGTE
ELLVKLNREDLLRKQRTFDNGSIPHQIHLGELHAILRRQEDFYPFLKDNREKIEKILTFRIPYYV
GPLARGNSRFAWMTRKSEETITPWNFEEVVDKGASAQSFIERMTNFDKNLPNEKVLPKHSLLYEY
FTVYNELTKVKYVTEGMRKPAFLSGEQKKAIVDLLFKTNRKVTVKQLKEDYFKKIECFDSVEISG
VEDRFNASLGTYHDLLKIIKDKDFLDNEENEDILEDIVLTLTLFEDREMIEERLKTYAHLFDDKV
MKQLKRRRYTGWGRLSRKLINGIRDKQSGKTILDFLKSDGFANRNFMQLIHDDSLTFKEDIQKAQ
VSGQGDSLHEHIANLAGSPAIKKGILQTVKVVDELVKVMGRHKPENIVIEMARENQTTQKGQKNS
RERMKRIEEGIKELGSQILKEHPVENTQLQNEKLYLYYLQNGRDMYVDQELDINRLSDYDVDHIV
PQSFLKDDSIDNKVLTRSDKNRGKSDNVPSEEVVKKMKNYWRQLLNAKLITQRKFDNLTKAERGG
LSELDKAGFIKRQLVETRQITKHVAQILDSRMNTKYDENDKLIREVKVITLKSKLVSDFRKDFQF
YKVREINNYHHAHDAYLNAVVGTALIKKYPKLESEFVYGDYKVYDVRKMIAKSEQEIGKATAKYF
FYSNIMNFFKTEITLANGEIRKRPLIETNGETGEIVWDKGRDFATVRKVLSMPQVNIVKKTEVQT
GGFSKESILPKRNSDKLIARKKDWDPKKYGGFVSPTVAYSVLVVAKVEKGKSKKLKSVKELLGIT
IMERSSFEKNPIDFLEAKGYKEVKKDLIIKLPKYSLFELENGRKRMLASARELQKGNELALPSKY
VNFLYLASHYEKLKGSPEDNEQKQLFVEQHKHYLDEIIEQISEFSKRVILADANLDKVLSAYNKH
RDKPIREQAENIIHLFTLTNLGAPAAFKYFDTTIDRKQYRSTKEVLDATLIHQSITGLYETRIDL
SQLGGDEGADKRTADGSEFESPKKKRKV
12. monoABE8.1_bpNLS + Y147T_Q154S
MSEVEFSHEYWMRHALTLAKRARDEREVPVGAVLVLNNRVIGEGWNRAIGLHDPTAHAEIMALRQ
GGLVMQNYRLIDATLYVTFEPCVMCAGAMIHSRIGRVVFGVRNAKTGAAGSLMDVLHYPGMNHRV
EITEGILADECAALLCTFFRMPRSVFNAQKKAQSSTDSGGSSGGSSGSETPGTSESATPESSGGS
SGGSDKKYSIGLAIGTNSVGWAVITDEYKVPSKKFKVLGNTDRHSIKKNLIGALLFDSGETAEAT
RLKRTARRRYTRRKNRICYLQEIFSNEMAKVDDSFFHRLEESFLVEEDKKHERHPIFGNIVDEVA
YHEKYPTIYHLRKKLVDSTDKADLRLIYLALAHMIKFRGHFLIEGDLNPDNSDVDKLFIQLVQTY
NQLFEENPINASGVDAKAILSARLSKSRRLENLIAQLPGEKKNGLFGNLIALSLGLTPNFKSNFD
LAEDAKLQLSKDTYDDDLDNLLAQIGDQYADLFLAAKNLSDAILLSDILRVNTEITKAPLSASMI
KRYDEHHQDLTLLKALVRQQLPEKYKEIFFDQSKNGYAGYIDGGASQEEFYKFIKPILEKMDGTE
ELLVKLNREDLLRKQRTFDNGSIPHQIHLGELHAILRRQEDFYPFLKDNREKIEKILTFRIPYYV
GPLARGNSRFAWMTRKSEETITPWNFEEVVDKGASAQSFIERMTNFDKNLPNEKVLPKHSLLYEY
FTVYNELTKVKYVTEGMRKPAFLSGEQKKAIVDLLFKTNRKVTVKQLKEDYFKKIECFDSVEISG
VEDRFNASLGTYHDLLKIIKDKDFLDNEENEDILEDIVLTLTLFEDREMIEERLKTYAHLFDDKV
MKQLKRRRYTGWGRLSRKLINGIRDKQSGKTILDFLKSDGFANRNFMQLIHDDSLTFKEDIQKAQ
VSGQGDSLHEHIANLAGSPAIKKGILQTVKVVDELVKVMGRHKPENIVIEMARENQTTQKGQKNS
RERMKRIEEGIKELGSQILKEHPVENTQLQNEKLYLYYLQNGRDMYVDQELDINRLSDYDVDHIV
PQSFLKDDSIDNKVLTRSDKNRGKSDNVPSEEVVKKMKNYWRQLLNAKLITQRKFDNLTKAERGG
LSELDKAGFIKRQLVETRQITKHVAQILDSRMNTKYDENDKLIREVKVITLKSKLVSDFRKDFQF
YKVREINNYHHAHDAYLNAVVGTALIKKYPKLESEFVYGDYKVYDVRKMIAKSEQEIGKATAKYF
FYSNIMNFFKTEITLANGEIRKRPLIETNGETGEIVWDKGRDFATVRKVLSMPQVNIVKKTEVQT
GGFSKESILPKRNSDKLIARKKDVVDPKKYGGFVSPTVAYSVLWAKVEKGKSKKLKSVKELLGIT
IMERSSFEKNPIDFLEAKGYKEVKKDLIIKLPKYSLFELENGRKRMLASARELQKGNELALPSKY
VNFLYLASHYEKLKGSPEDNEQKQLFVEQHKHYLDEIIEQISEFSKRVILADANLDKVLSAYNKH
RDKPIREQAENIIHLFTLTNLGAPAAFKYFDTTIDRKQYRSTKEVLDATLIHQSITGLYETRIDL
SQLGGDEGADKRTADGSEFESPKKKRKV
13. monoABE8.1_bpNLS + H123Y123H_Y147R_Q154R_I76Y
MSEVEFSHEYWMRHALTLAKRARDEREVPVGAVLVLNNRVIGEGWNRAIGLHDPTAHAEIMALRQ
GGLVMQNYRLYDATLYVTFEPCVMCAGAMIHSRIGRVVFGVRNAKTGAAGSLMDVLHHPGMNHRV
EITEGILADECAALLCRFFRMPRRVFNAQKKAQSSTDSGGSSGGSSGSETPGTSESATPESSGGS
SGGSDKKYSIGLAIGTNSVGWAVITDEYKVPSKKFKVLGNTDRHSIKKNLIGALLFDSGETAEAT
RLKRTARRRYTRRKNRICYLQEIFSNEMAKVDDSFFHRLEESFLVEEDKKHERHPIFGNIVDEVA
YHEKYPTIYHLRKKLVDSTDKADLRLIYLALAHMIKFRGHFLIEGDLNPDNSDVDKLFIQLVQTY
NQLFEENPINASGVDAKAILSARLSKSRRLENLIAQLPGEKKNGLFGNLIALSLGLTPNFKSNFD
LAEDAKLQLSKDTYDDDLDNLLAQIGDQYADLFLAAKNLSDAILLSDILRVNTEITKAPLSASMI
KRYDEHHQDLTLLKALVRQQLPEKYKEIFFDQSKNGYAGYIDGGASQEEFYKFIKPILEKMDGTE
ELLVKLNREDLLRKQRTFDNGSIPHQIHLGELHAILRRQEDFYPFLKDNREKIEKILTFRIPYYV
GPLARGNSRFAWMTRKSEETITPWNFEEVVDKGASAQSFIERMTNFDKNLPNEKVLPKHSLLYEY
FTVYNELTKVKYVTEGMRKPAFLSGEQKKAIVDLLFKTNRKVTVKQLKEDYFKKIECFDSVEISG
VEDRFNASLGTYHDLLKIIKDKDFLDNEENEDILEDIVLTLTLFEDREMIEERLKTYAHLFDDKV
MKQLKRRRYTGWGRLSRKLINGIRDKQSGKTILDFLKSDGFANRNFMQLIHDDSLTFKEDIQKAQ
VSGQGDSLHEHIANLAGSPAIKKGILQTVKVVDELVKVMGRHKPENIVIEMARENQTTQKGQKNS
RERMKRIEEGIKELGSQILKEHPVENTQLQNEKLYLYYLQNGRDMYVDQELDINRLSDYDVDHIV
PQSFLKDDSIDNKVLTRSDKNRGKSDNVPSEEVVKKMKNYWRQLLNAKLITQRKFDNLTKAERGG
LSELDKAGFIKRQLVETRQITKHVAQILDSRMNTKYDENDKLIREVKVITLKSKLVSDFRKDFQF
YKVREINNYHHAHDAYLNAVVGTALIKKYPKLESEFVYGDYKVYDVRKMIAKSEQEIGKATAKYF
FYSNIMNFFKTEITLANGEIRKRPLIETNGETGEIVWDKGRDFATVRKVLSMPQVNIVKKTEVQT
GGFSKESILPKRNSDKLIARKKDVVDPKKYGGFVSPTVAYSVLWAKVEKGKSKKLKSVKELLGIT
IMERSSFEKNPIDFLEAKGYKEVKKDLIIKLPKYSLFELENGRKRMLASARELQKGNELALPSKY
VNFLYLASHYEKLKGSPEDNEQKQLFVEQHKHYLDEIIEQISEFSKRVILADANLDKVLSAYNKH
RDKPIREQAENIIHLFTLTNLGAPAAFKYFDTTIDRKQYRSTKEVLDATLIHQSITGLYETRIDL
SQLGGDEGADKRTADGSEFESPKKKRKV
14. monoABE8.1_bpNLS + V82S + Q154R
MSEVEFSHEYWMRHALTLAKRARDEREVPVGAVLVLNNRVIGEGWNRAIGLHDPTAHAEIMALRQ
GGLVMQNYRLIDATLYSTFEPCVMCAGAMIHSRIGRVVFGVRNAKTGAAGSLMDVLHYPGMNHRV
EITEGILADECAALLCYFFRMPRRVFNAQKKAQSSTDSGGSSGGSSGSETPGTSESATPESSGGS
SGGSDKKYSIGLAIGTNSVGWAVITDEYKVPSKKFKVLGNTDRHSIKKNLIGALLFDSGETAEAT
RLKRTARRRYTRRKNRICYLQEIFSNEMAKVDDSFFHRLEESFLVEEDKKHERHPIFGNIVDEVA
YHEKYPTIYHLRKKLVDSTDKADLRLIYLALAHMIKFRGHFLIEGDLNPDNSDVDKLFIQLVQTY
NQLFEENPINASGVDAKAILSARLSKSRRLENLIAQLPGEKKNGLFGNLIALSLGLTPNFKSNFD
LAEDAKLQLSKDTYDDDLDNLLAQIGDQYADLFLAAKNLSDAILLSDILRVNTEITKAPLSASMI
KRYDEHHQDLTLLKALVRQQLPEKYKEIFFDQSKNGYAGYIDGGASQEEFYKFIKPILEKMDGTE
ELLVKLNREDLLRKQRTFDNGSIPHQIHLGELHAILRRQEDFYPFLKDNREKIEKILTFRIPYYV
GPLARGNSRFAWMTRKSEETITPWNFEEVVDKGASAQSFIERMTNFDKNLPNEKVLPKHSLLYEY
FTVYNELTKVKYVTEGMRKPAFLSGEQKKAIVDLLEKTNRKVTVKQLKEDYFKKIECFDSVEISG
VEDRFNASLGTYHDLLKIIKDKDFLDNEENEDILEDIVLTLTLFEDREMIEERLKTYAHLFDDKV
MKQLKRRRYTGWGRLSRKLINGIRDKQSGKTILDFLKSDGFANRNFMQLIHDDSLTFKEDIQKAQ
VSGQGDSLHEHIANLAGSPAIKKGILQTVKVVDELVKVMGRHKPENIVIEMARENQTTQKGQKNS
RERMKRIEEGIKELGSQILKEHPVENTQLQNEKLYLYYLQNGRDMYVDQELDINRLSDYDVDHIV
PQSFLKDDSIDNKVLTRSDKNRGKSDNVPSEEVVKKMKNYWRQLLNAKLITQRKFDNLTKAERGG
LSELDKAGFIKRQLVETRQITKHVAQILDSRMNTKYDENDKLIREVKVITLKSKLVSDFRKDFQF
YKVREINNYHHAHDAYLNAVVGTALIKKYPKLESEFVYGDYKVYDVRKMIAKSEQEIGKATAKYF
FYSNIMNFFKTEITLANGEIRKRPLIETNGETGEIVWDKGRDFATVRKVLSMPQVNIVKKTEVQT
GGFSKESILPKRNSDKLIARKKDVVDPKKYGGFVSPTVAYSVLWAKVEKGKSKKLKSVKELLGIT
IMERSSFEKNPIDFLEAKGYKEVKKDLIIKLPKYSLFELENGRKRMLASARELQKGNELALPSKY
VNFLYLASHYEKLKGSPEDNEQKQLFVEQHKHYLDEIIEQISEFSKRVILADANLDKVLSAYNKH
RDKPIREQAENIIHLFTLTNLGAPAAFKYFDTTIDRKQYRSTKEVLDATLIHQSITGLYETRIDL
SQLGGDEGADKRTADGSEFESPKKKRKV

[0554] In some embodiments, the base editor is a fusion protein comprising a polynucleotide programmable nucleotide binding domain (e.g., Cas9-derived domain) fused to a nucleobase editing domain (e.g., all or a portion of a deaminase domain). In certain embodiments, the fusion proteins provided herein comprise one or more features that improve the base editing activity of the fusion proteins. For example, any of the fusion proteins provided herein may comprise a Cas9 domain that has reduced nuclease activity. In some embodiments, any of the fusion proteins provided herein may have a Cas9 domain that does not have nuclease activity (dCas9), or a Cas9 domain that cuts one strand of a duplexed DNA molecule, referred to as a Cas9 nickase (nCas9).

[0555] In some embodiments, the base editor further comprises a domain comprising all or a portion of a uracil glycosylase inhibitor (UGI). In some embodiments, the base editor comprises a domain comprising all or a portion of a uracil binding protein (UBP), such as a uracil DNA glycosylase (UDG). In some embodiments, the base editor comprises a domain comprising all or a portion of a nucleic acid polymerase. In some embodiments, a nucleic acid polymerase or portion thereof incorporated into a base editor is a translesion DNA polymerase.

[0556] In some embodiments, a domain of the base editor can comprise multiple domains. For example, the base editor comprising a polynucleotide programmable nucleotide binding domain derived from Cas9 can comprise an REC lobe and an NUC lobe corresponding to the REC lobe and NUC lobe of a wild-type or natural Cas9. In another example, the base editor can comprise one or more of a RuvCI domain, BH domain, REC1 domain, REC2 domain, RuvCII domain, L1 domain, HNH domain, L2 domain, RuvCIII domain, WED domain, TOPO domain or CTD domain. In some embodiments, one or more domains of the base editor comprise a mutation (e.g., substitution, insertion, deletion) relative to a wild type version of a polypeptide comprising the domain. For example, an HNH domain of a polynucleotide programmable DNA binding domain can comprise an H840A substitution. In another example, a RuvCI domain of a polynucleotide programmable DNA binding domain can comprise a D10A substitution.

[0557] Different domains (e.g., adjacent domains) of the base editor disclosed herein can be connected to each other with or without the use of one or more linker domains (e.g., an XTEN linker domain). In some embodiments, a linker domain can be a bond (e.g., covalent bond), chemical group, or a molecule linking two molecules or moieties, e.g., two domains of a fusion protein, such as, for example, a first domain (e.g., Cas9-derived domain) and a second domain (e.g., an adenosine deaminase domain). In some embodiments, a linker is a covalent bond (e.g., a carbon-carbon bond, disulfide bond, carbon-hetero atom bond, etc.). In certain embodiments, a linker is a carbon nitrogen bond of an amide linkage. In certain embodiments, a linker is a cyclic or acyclic, substituted or unsubstituted, branched or unbranched aliphatic or heteroaliphatic linker. In certain embodiments, a linker is polymeric (e.g., polyethylene, polyethylene glycol, polyamide, polyester, etc.). In certain embodiments, a linker comprises a monomer, dimer, or polymer of aminoalkanoic acid. In some embodiments, a linker comprises an aminoalkanoic acid (e.g., glycine, ethanoic acid, alanine, beta-alanine, 3-aminopropanoic acid, 4-aminobutanoic acid, 5-pentanoic acid, etc.). In some embodiments, a linker comprises a monomer, dimer, or polymer of aminohexanoic acid (Ahx). In certain embodiments, a linker is based on a carbocyclic moiety (e.g., cyclopentane, cyclohexane). In other embodiments, a linker comprises a polyethylene glycol moiety (PEG). In certain embodiments, a linker comprises an aryl or heteroaryl moiety. In certain embodiments, the linker is based on a phenyl ring. A linker can include functionalized moieties to facilitate attachment of a nucleophile (e.g., thiol, amino) from the peptide to the linker. Any electrophile can be used as part of the linker. Exemplary electrophiles include, but are not limited to, activated esters, activated amides, Michael acceptors, alkyl halides, aryl halides, acyl halides, and isothiocyanates. In some embodiments, a linker joins a gRNA binding domain of an RNA-programmable nuclease, including a Cas9 nuclease domain, and the catalytic domain of a nucleic acid editing protein. In some embodiments, a linker joins a dCas9 and a second domain (e.g., UGI, etc.).

[0558] Typically, a linker is positioned between, or flanked by, two groups, molecules, or other moieties and connected to each one via a covalent bond, thus connecting the two. In some embodiments, a linker is an amino acid or a plurality of amino acids (e.g., a peptide or protein). In some embodiments, a linker is an organic molecule, group, polymer, or chemical moiety. In some embodiments, a linker is 2-100 amino acids in length, for example, 2, 3, 4, 5, 6, 7, 8, 9, 10, 11, 12, 13, 14, 15, 16, 17, 18, 19, 20, 21, 22, 23, 24, 25, 26, 27, 28, 29, 30, 30-35, 35-40, 40-45, 45-50, 50-60, 60-70, 70-80, 80-90, 90-100, 100-150, or 150-200 amino acids in length. In some embodiments, the linker is about 3 to about 104 (e.g., 5, 6, 7, 8, 9, 10, 11, 12, 13, 14, 15, 16, 17, 18, 19, 20, 21, 22, 23, 24, 25, 26, 27, 28, 29, 30, 31, 32, 33, 34, 35, 36, 37, 38, 39, 40, 41, 42, 43, 44, 45, 46, 47, 48, 49, 50, 55, 60, 65, 70, 75, 80, 85, 90, 95, or 100) amino acids in length. Longer or shorter linkers are also contemplated. In some embodiments, a linker domain comprises the amino acid sequence SGSETPGTSESATPES, which can also be referred to as the XTEN linker. Any method for linking the fusion protein domains can be employed (e.g., ranging from very flexible linkers of the form (SGGS)ₙ, (GGGS)ₙ, (GGGGS)ₙ, and (G)ₙ, to more rigid linkers of the form (EAAAK)ₙ, (GGS)ₙ, SGSETPGTSESATPES (see, e.g., Guilinger J P, Thompson D B, Liu D R. Fusion of catalytically inactive Cas9 to FokI nuclease improves the specificity of genome modification. Nat. Biotechnol. 2014; 32(6): 577-82; the entire contents are incorporated herein by reference), or (XP)n motif, in order to achieve the optimal length for activity for the nucleobase editor. In some embodiments, n is 1, 2, 3, 4, 5, 6, 7, 8, 9, 10, 11, 12, 13, 14, or 15. In some embodiments, the linker comprises a (GGS)n motif, wherein n is 1, 3, or 7. In some embodiments, the Cas9 domain of the fusion proteins provided herein are fused via a linker comprising the amino acid sequence SGSETPGTSESATPES. In some embodiments, a linker comprises a plurality of proline residues and is 5-21, 5-14, 5-9, 5-7 amino acids in length, e.g., PAPAP, PAPAPA, PAPAPAP, PAPAPAPA, P(AP)₄, P(AP)₇, P(AP)₁₀ (see, e.g., Tan J, Zhang F, Karcher D, Bock R. Engineering of high-precision base editors for site-specific single nucleotide replacement. Nat Commun. 2019 Jan. 25; 10(1):439; the entire contents are incorporated herein by reference). Such proline-rich linkers are also termed “rigid” linkers.

[0559] A fusion protein as described herein comprises a nucleic acid editing domain. In some embodiments, the deaminase is an adenosine deaminase. In some embodiments, the deaminase is a vertebrate deaminase. In some embodiments, the deaminase is an invertebrate deaminase. In some embodiments, the deaminase is a human, chimpanzee, gorilla, monkey, cow, dog, rat, or mouse deaminase. In some embodiments, the deaminase is a human deaminase. In some embodiments, the deaminase is a rat deaminase.

### Linkers

[0560] In certain embodiments, linkers may be used to link any of the peptides or peptide domains as described herein. The linker may be as simple as a covalent bond, or it may be a polymeric linker many atoms in length. In certain embodiments, the linker is a polypeptide or based on amino acids. In other embodiments, the linker is not peptide-like. In certain embodiments, the linker is a covalent bond (e.g., a carbon-carbon bond, disulfide bond, carbon-heteroatom bond, etc.). In certain embodiments, the linker is a carbon-nitrogen bond of an amide linkage. In certain embodiments, the linker is a cyclic or acyclic, substituted or unsubstituted, branched or unbranched aliphatic or heteroaliphatic linker. In certain embodiments, the linker is polymeric (e.g., polyethylene, polyethylene glycol, polyamide, polyester, etc.). In certain embodiments, the linker comprises a monomer, dimer, or polymer of aminoalkanoic acid. In certain embodiments, the linker comprises an aminoalkanoic acid (e.g., glycine, ethanoic acid, alanine, beta-alanine, 3-aminopropanoic acid, 4-aminobutanoic acid, 5-pentanoic acid, etc.). In certain embodiments, the linker comprises a monomer, dimer, or polymer of aminohexanoic acid (Ahx). In certain embodiments, the linker is based on a carbocyclic moiety (e.g., cyclopentane, cyclohexane). In other embodiments, the linker comprises a polyethylene glycol moiety (PEG). In other embodiments, the linker comprises amino acids. In certain embodiments, the linker comprises a peptide. In certain embodiments, the linker comprises an aryl or heteroaryl moiety. In certain embodiments, the linker is based on a phenyl ring. The linker may include functionalized moieties to facilitate attachment of a nucleophile (e.g., thiol, amino) from the peptide to the linker. Any electrophile may be used as part of the linker. Exemplary electrophiles include, but are not limited to, activated esters, activated amides, Michael acceptors, alkyl halides, aryl halides, acyl halides, and isothiocyanates.

[0561] In some embodiments, the linker is an amino acid or a plurality of amino acids (e.g., a peptide or protein). In some embodiments, the linker is a bond (e.g., a covalent bond), an organic molecule, group, polymer, or chemical moiety. In some embodiments, the linker is about 3 to about 104 (e.g., 5, 6, 7, 8, 9, 10, 11, 12, 13, 14, 15, 16, 17, 18, 19, 20, 21, 22, 23, 24, 25, 26, 27, 28, 29, 30, 31, 32, 33, 34, 35, 36, 37, 38, 39, 40, 41, 42, 43, 44, 45, 46, 47, 48, 49, 50, 55, 60, 65, 70, 75, 80, 85, 90, 95, or 100) amino acids in length.

[0562] In some embodiments, the adenosine deaminase and the napDNAbp are fused via a linker that is 4, 16, 32, or 104 amino acids in length. In some embodiments, the linker is about 3 to about 104 amino acids in length. In some embodiments, any of the fusion proteins provided herein, comprise an adenosine deaminase and a Cas9 domain that are fused to each other via a linker. Various linker lengths and flexibilities between the deaminase domain (e.g., an engineered ecTadA) and the Cas9 domain can be employed (e.g., ranging from very flexible linkers of the form (GGGS)ₙ, (GGGGS)ₙ, and (G)ₙ to more rigid linkers of the form (EAAAK)ₙ, (SGGS)ₙ, SGSETPGTSESATPES (see, e.g., Guilinger J P, Thompson D B, Liu D R. Fusion of catalytically inactive Cas9 to FokI nuclease improves the specificity of genome modification. Nat. Biotechnol. 2014; 32(6): 577-82; the entire contents are incorporated herein by reference) and (XP)n) in order to achieve the optimal length for activity for the nucleobase editor. In some embodiments, n is 1, 2, 3, 4, 5, 6, 7, 8, 9, 10, 11, 12, 13, 14, or 15. In some embodiments, the linker comprises a (GGS)ₙ motif, wherein n is 1, 3, or 7. In some embodiments, the adenosine deaminase and the Cas9 domain of any of the fusion proteins provided herein are fused via a linker (e.g., an XTEN linker) comprising the amino acid sequence SGSETPGTSESATPES.

Cas9 Complexes with Guide RNAs

[0563] Some aspects of this disclosure provide complexes comprising any of the fusion proteins provided herein, and a guide RNA (e.g., a guide that targets an Mecp2 allele bearing RTT targetable mutations) bound to a CAS9 domain (e.g., a dCas9, a nuclease active Cas9, or a Cas9 nickase) of fusion protein. These complexes are also termed ribonucleoproteins (RNPs). Any method for linking the fusion protein domains can be employed (e.g., ranging from very flexible linkers of the form (GGGS)ₙ, (GGGGS)ₙ, and (G)n to more rigid linkers of the form (EAAAK)ₙ, (SGGS)ₙ, SGSETPGTSESATPES (see, e.g., Guilinger J P, Thompson D B, Liu D R. Fusion of catalytically inactive Cas9 to FokI nuclease improves the specificity of genome modification. Nat. Biotechnol. 2014; 32(6): 577-82; the entire contents are incorporated herein by reference) and (XP)n) in order to achieve the optimal length for activity for the nucleobase editor. In some embodiments, n is 1, 2, 3, 4, 5, 6, 7, 8, 9, 10, 11, 12, 13, 14, or 15. In some embodiments, the linker comprises a (GGS)ₙ motif, wherein n is 1, 3, or 7. In some embodiments, the Cas9 domain of the fusion proteins provided herein are fused via a linker comprising the amino acid sequence SGSETPGTSESATPES.

[0564] In some embodiments, the guide nucleic acid (e.g., guide RNA) is from 15-100 nucleotides long and comprises a sequence of at least 10 contiguous nucleotides that is complementary to a target sequence. In some embodiments, the guide RNA is 15, 16, 17, 18, 19, 20, 21, 22, 23, 24, 25, 26, 27, 28, 29, 30, 31, 32, 33, 34, 35, 36, 37, 38, 39, 40, 41, 42, 43, 44, 45, 46, 47, 48, 49, or 50 nucleotides long. In some embodiments, the guide RNA comprises a sequence of 15, 16, 17, 18, 19, 20, 21, 22, 23, 24, 25, 26, 27, 28, 29, 30, 31, 32, 33, 34, 35, 36, 37, 38, 39, or 40 contiguous nucleotides that is complementary to a target sequence. In some embodiments, the target sequence is a DNA sequence. In some embodiments, the target sequence is a sequence in the genome of a bacteria, yeast, fungi, insect, plant, or animal. In some embodiments, the target sequence is a sequence in the genome of a human. In some embodiments, the 3′ end of the target sequence is immediately adjacent to a canonical PAM sequence (NGG). In some embodiments, the 3′ end of the target sequence is immediately adjacent to a non-canonical PAM sequence (e.g., a sequence listed in Table 1 or 5′-NAA-3′). In some embodiments, the guide nucleic acid (e.g., guide RNA) is complementary to a sequence in Mecp2 allele bearing RTT targetable mutations.

[0565] Some aspects of this disclosure provide methods of using the fusion proteins, or complexes provided herein. For example, some aspects of this disclosure provide methods comprising contacting a DNA molecule with any of the fusion proteins provided herein, and with at least one guide RNA, wherein the guide RNA is about 15-100 nucleotides long and comprises a sequence of at least 10 contiguous nucleotides that is complementary to a target sequence. In some embodiments, the 3′ end of the target sequence is immediately adjacent to an AGC, GAG, TTT, GTG, or CAA sequence. In some embodiments, the 3′ end of the target sequence is immediately adjacent to an NGA, NAA, NGCG, NGN, NNGRRT, NNNRRT, NGCG, NGCN, NGTN, NGTN, NGTN, or 5′ (TTTV) sequence.

[0566] It will be understood that the numbering of the specific positions or residues in the respective sequences depends on the particular protein and numbering scheme used. Numbering might differ, e.g., in precursors of a mature protein and the mature protein itself, and differences in sequences from species to species may affect numbering. One of skill in the art will be able to identify the respective residue in any homologous protein and in the respective encoding nucleic acid by methods well known in the art, e.g., by sequence alignment and determination of homologous residues.

[0567] It will be apparent to those of skill in the art that in order to target any of fusion protein comprising a Cas9 domain and an adenosine deaminase variant (e.g., TadA*8), as disclosed herein, to a target site, e.g., a site comprising a mutation to be edited, it is typically necessary to co-express the fusion protein together with a guide RNA, e.g., an sgRNA. As explained in more detail elsewhere herein, a guide RNA typically comprises a tracrRNA framework allowing for Cas9 binding, and a guide sequence, which confers sequence specificity to the Cas9: nucleic acid editing enzyme/domain fusion protein. Alternatively, the guide RNA and tracrRNA may be provided separately, as two nucleic acid molecules. In some embodiments, the guide RNA comprises a structure, wherein the guide sequence comprises a sequence that is complementary to the target sequence. The guide sequence is typically 20 nucleotides long. The sequences of suitable guide RNAs for targeting Cas9: nucleic acid editing enzyme/domain fusion proteins to specific genomic target sites will be apparent to those of skill in the art based on the instant disclosure. Such suitable guide RNA sequences typically comprise guide sequences that are complementary to a nucleic sequence within 50 nucleotides upstream or downstream of the target nucleotide to be edited. Some exemplary guide RNA sequences suitable for targeting any of the provided fusion proteins to specific target sequences are provided herein.

[0568] The domains of the base editor disclosed herein can be arranged in any order. Non-limiting examples of a base editor comprising a fusion protein comprising e.g., a polynucleotide-programmable nucleotide-binding domain and a deaminase domain can be arranged as following: NH₂-[nucleobase editing domain]-Linker1-[e.g., Cas9 derived domain]-COOH; NH₂-[e.g., adenosine deaminase]-Linker1-[e.g., Cas9 derived domain]-COOH; NH₂-[e.g., adenosine deaminase]-Linker1-[e.g., Cas9 derived domain]-Linker2-[UGI]-COOH; NH₂-[e.g., TadA*7.10]-Linker1-[e.g., Cas9 derived domain]-COOH; NH₂-[e.g., adenosine deaminase]-Linker1-[e.g., Cas9 derived domain]-COOH; NH₂-[e.g., TadA*7.10]-Linker1-[e.g., Cas9 derived domain]-COOH; NH₂-[e.g., TadA*7.10]-Linker1-[e.g., Cas9 derived domain]-Linker2-[UGI]-COOH NH₂-[e.g., adenosine deaminase]-[e.g., Cas9 derived domain]-COOH; NH₂-[e.g., Cas9 derived domain]-[e.g., adenosine deaminase]-COOH; NH₂-[e.g., adenosine deaminase]-[e.g., Cas9 derived domain]-[inosine BER inhibitor]-COOH; NH₂-[e.g., adenosine deaminase]-[inosine BER inhibitor]-[e.g., Cas9 derived domain]-COOH; NH₂-[inosine BER inhibitor]-[e.g., adenosine deaminase]-[e.g., Cas9 derived domain]-COOH; NH₂-[e.g., Cas9 derived domain]-[e.g., adenosine deaminase]-[inosine BER inhibitor]-COOH; NH₂-[e.g., Cas9 derived domain]-[inosine BER inhibitor]-[e.g., adenosine deaminase]-COOH; or NH₂-[inosine BER inhibitor]-[e.g., Cas9 derived domain]-[e.g., adenosine deaminase]-COOH.

[0569] Additionally, in some embodiments, a Gam protein can be fused to an N terminus of a base editor. In some embodiments, a Gam protein can be fused to a C terminus of a base editor. The Gam protein of bacteriophage Mu can bind to the ends of double strand breaks (DSBs) and protect them from degradation. In some embodiments, using Gam to bind the free ends of DSB can reduce indel formation during the process of base editing. In some embodiments, 174-residue Gam protein is fused to the N terminus of the base editors. See Komor, A. C., et al., “Improved base excision repair inhibition and bacteriophage Mu Gam protein yields C:G-to-T:A base editors with higher efficiency and product purity” Science Advances 3:eaao4774 (2017). In some embodiments, a mutation or mutations can change the length of a base editor domain relative to a wild type domain. For example, a deletion of at least one amino acid in at least one domain can reduce the length of the base editor. In another case, a mutation or mutations do not change the length of a domain relative to a wild type domain. For example, substitutions in any domain does not change the length of the base editor.

[0570] In some embodiments, the base editing fusion proteins provided herein need to be positioned at a precise location, for example, where a target base is placed within a defined region (e.g., a “deamination window”). In some embodiments, a target can be within a 4-base region. In some embodiments, such a defined target region can be approximately 15 bases upstream of the PAM. See Komor, A. C., et al., “Programmable editing of a target base in genomic DNA without double-stranded DNA cleavage” Nature 533, 420-424 (2016); Gaudelli, N. M., et al., “Programmable base editing of A⋅T to G⋅C in genomic DNA without DNA cleavage” Nature 551, 464-471 (2017); and Komor, A. C., et al., “Improved base excision repair inhibition and bacteriophage Mu Gam protein yields C:G-to-T:A base editors with higher efficiency and product purity” Science Advances 3:eaao4774 (2017), the entire contents of which are hereby incorporated by reference.

[0571] A defined target region can be a deamination window. A deamination window can be the defined region in which a base editor acts upon and deaminates a target nucleotide. In some embodiments, the deamination window is within a 2, 3, 4, 5, 6, 7, 8, 9, or 10 base regions. In some embodiments, the deamination window is 5, 6, 7, 8, 9, 10, 11, 12, 13, 14, 15, 16, 17, 18, 19, 20, 21, 22, 23, 24, or 25 bases upstream of the PAM.

[0572] The base editors of the present disclosure can comprise any domain, feature or amino acid sequence which facilitates the editing of a target polynucleotide sequence. For example, in some embodiments, the base editor comprises a nuclear localization sequence (NLS). In some embodiments, an NLS of the base editor is localized between a deaminase domain and a polynucleotide programmable nucleotide binding domain. In some embodiments, an NLS of the base editor is localized C-terminal to a polynucleotide programmable nucleotide binding domain.

[0573] Non-limiting examples of protein domains which can be included in the fusion protein include a deaminase domain (e.g., adenosine deaminase), a uracil glycosylase inhibitor (UGI) domain, epitope tags, reporter gene sequences, and/or protein domains having one or more of the following activities: methylase activity, demethylase activity, transcription activation activity, transcription repression activity, transcription release factor activity, histone modification activity, RNA cleavage activity, and nucleic acid binding activity. Additional domains can be a heterologous functional domain. Such heterologous functional domains can confer a function activity, such as DNA methylation, DNA damage, DNA repair, modification of a target polypeptide associated with target DNA (e.g., a histone, a DNA-binding protein, etc.), leading to, for example, histone methylation, histone acetylation, histone ubiquitination, and the like.

[0574] Other functions conferred can include methyltransferase activity, demethylase activity, deamination activity, dismutase activity, alkylation activity, depurination activity, oxidation activity, pyrimidine dimer forming activity, integrase activity, transposase activity, recombinase activity, polymerase activity, ligase activity, helicase activity, photolyase activity or glycosylase activity, acetyltransferase activity, deacetylase activity, kinase activity, phosphatase activity, ubiquitin ligase activity, deubiquitinating activity, adenylation activity, deadenylation activity, SUMOylating activity, deSUMOylating activity, ribosylation activity, deribosylation activity, myristoylation activity, remodeling activity, protease activity, oxidoreductase activity, transferase activity, hydrolase activity, lyase activity, isomerase activity, synthase activity, synthetase activity, and demyristoylation activity, or any combination thereof.

[0575] Non-limiting examples of epitope tags include histidine (His) tags, V5 tags, FLAG tags, influenza hemagglutinin (HA) tags, Myc tags, VSV-G tags, and thioredoxin (Trx) tags. Examples of reporter genes include, but are not limited to, glutathione-5-transferase (GST), horseradish peroxidase (HRP), chloramphenicol acetyltransferase (CAT) beta-galactosidase, beta-glucuronidase, luciferase, green fluorescent protein (GFP), HcRed, DsRed, cyan fluorescent protein (CFP), yellow fluorescent protein (YFP), and autofluorescent proteins including blue fluorescent protein (BFP). Additional protein sequences can include amino acid sequences that bind DNA molecules or bind other cellular molecules, including but not limited to maltose binding protein (MBP), S-tag, Lex A DNA binding domain (DBD) fusions, GAL4 DNA binding domain fusions, and herpes simplex virus (HSV) BP16 protein fusions.

Cas12 Complexes with Guide RNAs

[0576] Some aspects of this disclosure provide complexes comprising any of the fusion proteins provided herein, and a guide RNA (e.g., a guide that targets a target polynucleotide for editing).

[0577] In some embodiments, the guide nucleic acid (e.g., guide RNA) is from 15-100 nucleotides long and comprises a sequence of at least 10 contiguous nucleotides that is complementary to a target sequence. In some embodiments, the guide RNA is 15, 16, 17, 18, 19, 20, 21, 22, 23, 24, 25, 26, 27, 28, 29, 30, 31, 32, 33, 34, 35, 36, 37, 38, 39, 40, 41, 42, 43, 44, 45, 46, 47, 48, 49, or 50 nucleotides long. In some embodiments, the guide RNA comprises a sequence of 15, 16, 17, 18, 19, 20, 21, 22, 23, 24, 25, 26, 27, 28, 29, 30, 31, 32, 33, 34, 35, 36, 37, 38, 39, or 40 contiguous nucleotides that is complementary to a target sequence. In some embodiments, the target sequence is a DNA sequence. In some embodiments, the target sequence is a sequence in the genome of a bacteria, yeast, fungi, insect, plant, or animal. In some embodiments, the target sequence is a sequence in the genome of a human. In some embodiments, the 3′ end of the target sequence is immediately adjacent to a canonical PAM sequence. In some embodiments, the 3′ end of the target sequence is immediately adjacent to a non-canonical PAM sequence.

[0578] Some aspects of this disclosure provide methods of using the fusion proteins, or complexes provided herein. For example, some aspects of this disclosure provide methods comprising contacting a DNA molecule with any of the fusion proteins provided herein, and with at least one guide RNA, wherein the guide RNA is about 15-100 nucleotides long and comprises a sequence of at least 10 contiguous nucleotides that is complementary to a target sequence. In some embodiments, the 3′ end of the target sequence is immediately adjacent to an e.g., TTN, DTTN, GTTN, ATTN, ATTC, DTTNT, WTTN, HATY, TTTN, TTTV, TTTC, TG, RTR, or YTN PAM site.

[0579] It will be understood that the numbering of the specific positions or residues in the respective sequences depends on the particular protein and numbering scheme used. Numbering might be different, e.g., in precursors of a mature protein and the mature protein itself, and differences in sequences from species to species may affect numbering. One of skill in the art will be able to identify the respective residue in any homologous protein and in the respective encoding nucleic acid by methods well known in the art, e.g., by sequence alignment and determination of homologous residues.

[0580] It will be apparent to those of skill in the art that in order to target any of the fusion proteins disclosed herein, to a target site, e.g., a site comprising a mutation to be edited, it is typically necessary to co-express the fusion protein together with a guide RNA. As explained in more detail elsewhere herein, a guide RNA typically comprises a tracrRNA framework allowing for Cas12 binding, and a guide sequence, which confers sequence specificity to the Cas12:nucleic acid editing enzyme/domain fusion protein. Alternatively, the guide RNA and tracrRNA may be provided separately, as two nucleic acid molecules. In some embodiments, the guide RNA comprises a structure, wherein the guide sequence comprises a sequence that is complementary to the target sequence. The guide sequence is typically 20 nucleotides long. The sequences of suitable guide RNAs for targeting Cas12:nucleic acid editing enzyme/domain fusion proteins to specific genomic target sites will be apparent to those of skill in the art based on the instant disclosure. Such suitable guide RNA sequences typically comprise guide sequences that are complementary to a nucleic sequence within 50 nucleotides upstream or downstream of the target nucleotide to be edited. Some exemplary guide RNA sequences suitable for targeting any of the provided fusion proteins to specific target sequences are provided herein.

[0581] The domains of the base editor disclosed herein can be arranged in any order as long as the deaminase domain is internalized in the Cas12 protein. Non-limiting examples of a base editor comprising a fusion protein comprising e.g., a Cas12 domain and a deaminase domain can be arranged as following: NH2-[Cas12 domain]-Linker1-[ABE8]-Linker2-[Cas12 domain]-COOH; NH2-[Cas12 domain]-Linker1-[ABE8]-[Cas12 domain]-COOH; NH2-[Cas12 domain]-[ABE8]-Linker2-[Cas12 domain]-COOH; NH2-[Cas12 domain]-[ABE8]-[Cas12 domain]-COOH; NH2-[Cas12 domain]-Linker1-[ABE8]-Linker2-[Cas12 domain]-[inosine BER inhibitor]-COOH; NH2-[Cas12 domain]-Linker1-[ABE8]-[Cas12 domain]-[inosine BER inhibitor]-COOH; NH2-[Cas12 domain]-[ABE8]-Linker2-[Cas12 domain]-[inosine BER inhibitor]-COOH; NH2-[Cas12 domain]-[ABE8]-[Cas12 domain]-[inosine BER inhibitor]-COOH; NH2-[inosine BER inhibitor]-[Cas12 domain]-Linker1-[ABE8]-Linker2-[Cas12 domain]-COOH; NH2-[inosine BER inhibitor]-[Cas12 domain]-Linker1-[ABE8]-[Cas12 domain]-COOH; NH2-[inosine BER inhibitor]-[Cas12 domain]-[ABE8]-Linker2-[Cas12 domain]-COOH; NH2-[inosine BER inhibitor]NH2-[Cas12 domain]-[ABE8]-[Cas12 domain]-COOH;

[0582] Additionally, in some cases, a Gam protein can be fused to an N terminus of a base editor. In some cases, a Gam protein can be fused to a C terminus of a base editor. The Gam protein of bacteriophage Mu can bind to the ends of double strand breaks (DSBs) and protect them from degradation. In some embodiments, using Gam to bind the free ends of DSB can reduce indel formation during the process of base editing. In some embodiments, 174-residue Gam protein is fused to the N terminus of the base editors. See. Komor, A. C., et al., “Improved base excision repair inhibition and bacteriophage Mu Gam protein yields C:G-to-T:A base editors with higher efficiency and product purity” Science Advances 3:eaao4774 (2017). In some cases, a mutation or mutations can change the length of a base editor domain relative to a wild type domain. For example, a deletion of at least one amino acid in at least one domain can reduce the length of the base editor. In another case, a mutation or mutations do not change the length of a domain relative to a wild type domain. For example, substitution(s) in any domain does/do not change the length of the base editor.

[0583] In some embodiments, the base editing fusion proteins provided herein need to be positioned at a precise location, for example, where a target base is placed within a defined region (e.g., a “deamination window”). In some cases, a target can be within a 4-base region. In some cases, such a defined target region can be approximately 15 bases upstream of the PAM. See Komor, A. C., et al., “Programmable editing of a target base in genomic DNA without double-stranded DNA cleavage” Nature 533, 420-424 (2016); Gaudelli, N. M., et al., “Programmable base editing of A⋅T to G⋅C in genomic DNA without DNA cleavage” Nature 551, 464-471 (2017); and Komor, A. C., et al., “Improved base excision repair inhibition and bacteriophage Mu Gam protein yields C:G-to-T:A base editors with higher efficiency and product purity” Science Advances 3:eaao4774 (2017), the entire contents of which are hereby incorporated by reference.

[0584] A defined target region can be a deamination window. A deamination window can be the defined region in which a base editor acts upon and deaminates a target nucleotide. In some embodiments, the deamination window is within a 2, 3, 4, 5, 6, 7, 8, 9, or 10 base regions. In some embodiments, the deamination window is 5, 6, 7, 8, 9, 10, 11, 12, 13, 14, 15, 16, 17, 18, 19, 20, 21, 22, 23, 24, or 25 bases upstream of the PAM.

[0585] The base editors of the present disclosure can comprise any domain, feature or amino acid sequence which facilitates the editing of a target polynucleotide sequence. For example, in some embodiments, the base editor comprises a nuclear localization sequence (NLS). In some embodiments, an NLS of the base editor is localized between a deaminase domain and a napDNAbp domain. In some embodiments, an NLS of the base editor is localized C-terminal to a napDNAbp domain.

[0586] Protein domains included in the fusion protein can be a heterologous functional domain. Non-limiting examples of protein domains which can be included in the fusion protein include a deaminase domain (e.g., adenosine deaminase), a uracil glycosylase inhibitor (UGI) domain, epitope tags, and reporter gene sequences. Protein domains can be a heterologous functional domain, for example, having one or more of the following activities: transcriptional activation activity, transcriptional repression activity, transcription release factor activity, gene silencing activity, chromatin modifying activity, epigenetic modifying activity, histone modification activity, RNA cleavage activity, and nucleic acid binding activity. Such heterologous functional domains can confer a function activity, such as modification of a target polypeptide associated with target DNA (e.g., a histone, a DNA binding protein, etc.), leading to, for example, histone methylation, histone acetylation, histone ubiquitination, and the like. Other functions and/or activities conferred can include transposase activity, integrase activity, recombinase activity, ligase activity, ubiquitin ligase activity, deubiquitinating activity, adenylation activity, deadenylation activity, SUMOylation activity, deSUMOylation activity, or any combination of the above.

[0587] A domain may be detected or labeled with an epitope tag, a reporter protein, other binding domains. Non-limiting examples of epitope tags include histidine (His) tags, V5 tags, FLAG tags, influenza hemagglutinin (HA) tags, Myc tags, VSV-G tags, and thioredoxin (Trx) tags. Examples of reporter genes include, but are not limited to, glutathione-5-transferase (GST), horseradish peroxidase (HRP), chloramphenicol acetyltransferase (CAT) beta-galactosidase, beta-glucuronidase, luciferase, green fluorescent protein (GFP), HcRed, DsRed, cyan fluorescent protein (CFP), yellow fluorescent protein (YFP), and autofluorescent proteins including blue fluorescent protein (BFP). Additional protein sequences can include amino acid sequences that bind DNA molecules or bind other cellular molecules, including but not limited to maltose binding protein (MBP), S-tag, Lex A DNA binding domain (DBD) fusions, GAL4 DNA binding domain fusions, and herpes simplex virus (HSV) BP16 protein fusions.

[0588] In some embodiments, BhCas12b guide polynucleotide has the following sequence:

BhCas12b sgRNA scaffold (underlined) + 20 nt to
23 nt guide sequence (denoted by Nₙ)
5′GUUCUGTCUUUUGGUCAGGACAACCGUCUAGCUAUAAGUGCUGCAGGG
UGUGAGAAACUCCUAUUGCUGGACGAUGUCUCUUACGAGGCAUUAGCACN
NNNNNNNNNNNNNNNNNNN-3′

[0589] In some embodiments, BvCas12b and AaCas12b guide polynucleotides have the following sequences:

BvCas12b sgRNA scaffold (underlined) + 20 nt to
23 nt guide sequence (denoted by Nₙ)
5′GACCUAUAGGGUCAAUGAAUCUGUGCGUGUGCCAUAAGUAAUUAAAAA
UUACCCACCACAGGAGCACCUGAAAACAGGUGCUUGGCACNNNNNNNNNN
NNNNNNNNNN-3′
AaCas12b sgRNA scaffold (underlined) + 20 nt to
23 nt guide sequence (denoted by Nₙ)
5′GUCUAAAGGACAGAAUUUUUCAACGGGUGUGCCAAUGGCCACUUUCCA
GGUGGCAAAGCCCGUUGAACUUCUCAAAAAGAACGAUCUGAGAAGUGGCA
CNNNNNNNNNNNNNNNNNNNN-3′

### Methods of Using Fusion Proteins Comprising Adenosine Deaminase Variant and a Cas9 Domain

[0590] Some aspects of this disclosure provide methods of using the fusion proteins, or complexes provided herein. For example, some aspects of this disclosure provide methods comprising contacting a DNA molecule encoding a mutant form of a protein with any of the fusion proteins provided herein, and with at least one guide RNA, wherein the guide RNA is about 15-100 nucleotides long and comprises a sequence of at least 10 contiguous nucleotides that is complementary to a target sequence. In some embodiments, the 3′ end of the target sequence is immediately adjacent to a canonical PAM sequence (NGG). In some embodiments, the 3′ end of the target sequence is not immediately adjacent to a canonical PAM sequence (NGG). In some embodiments, the 3′ end of the target sequence is immediately adjacent to an AGC, GAG, TTT, GTG, or CAA sequence. In some embodiments, the 3′ end of the target sequence is immediately adjacent to an NGA, NGCG, NGN, NNGRRT, NNNRRT, NGCG, NGCN, NGTN, NGTN, NGTN, or 5′ (TTTV) sequence.

[0591] In some embodiments, a fusion protein of the disclosure is used for mutagenizing a target of interest. In particular, an adenosine deaminase nucleobase editor (e.g., ABE8) described herein is capable of making multiple mutations within a target sequence. These mutations may affect the function of the target. For example, when an adenosine deaminase nucleobase editor (e.g., ABE8) is used to target a regulatory region the function of the regulatory region is altered and the expression of the downstream protein is reduced.

[0592] It will be understood that the numbering of the specific positions or residues in the respective sequences depends on the particular protein and numbering scheme used. Numbering might be different, e.g., in precursors of a mature protein and the mature protein itself, and differences in sequences from species to species may affect numbering. One of skill in the art will be able to identify the respective residue in any homologous protein and in the respective encoding nucleic acid by methods well known in the art, e.g., by sequence alignment and determination of homologous residues.

[0593] It will be apparent to those of skill in the art that in order to target any of the fusion proteins comprising a Cas9 domain and an adenosine deaminase variant (e.g., ABE8), as disclosed herein, to a target site, e.g., a site comprising a mutation to be edited, it is typically necessary to co-express the fusion protein together with a guide RNA, e.g., an sgRNA. As explained in more detail elsewhere herein, a guide RNA typically comprises a tracrRNA framework allowing for Cas9 binding, and a guide sequence, which confers sequence specificity to the Cas9:nucleic acid editing enzyme/domain fusion protein. Alternatively, the guide RNA and tracrRNA may be provided separately, as two nucleic acid molecules. In some embodiments, the guide RNA comprises a structure, wherein the guide sequence comprises a sequence that is complementary to the target sequence. The guide sequence is typically 20 nucleotides long. The sequences of suitable guide RNAs for targeting Cas9:nucleic acid editing enzyme/domain fusion proteins to specific genomic target sites will be apparent to those of skill in the art based on the instant disclosure. Such suitable guide RNA sequences typically comprise guide sequences that are complementary to a nucleic sequence within 50 nucleotides upstream or downstream of the target nucleotide to be edited. Some exemplary guide RNA sequences suitable for targeting any of the provided fusion proteins to specific target sequences are provided herein.

### Base Editor Efficiency

[0594] CRISPR-Cas9 nucleases have been widely used to mediate targeted genome editing. In most genome editing applications, Cas9 forms a complex with a guide polynucleotide (e.g., single guide RNA (sgRNA)) and induces a double-stranded DNA break (DSB) at the target site specified by the sgRNA sequence. Cells primarily respond to this DSB through the non-homologous end-joining (NHEJ) repair pathway, which results in stochastic insertions or deletions (indels) that can cause frameshift mutations that disrupt the gene. In the presence of a donor DNA template with a high degree of homology to the sequences flanking the DSB, gene correction can be achieved through an alternative pathway known as homology directed repair (HDR). Unfortunately, under most non-perturbative conditions HDR is inefficient, dependent on cell state and cell type, and dominated by a larger frequency of indels. As most of the known genetic variations associated with human disease are point mutations, methods that can more efficiently and cleanly make precise point mutations are needed. Base editing systems, as provided herein, provide a new way to genome edit without generating double-stranded DNA breaks, without requiring a donor DNA template, and without inducing an excess of stochastic insertions and deletions.

[0595] The base editors provided herein are capable of modifying a specific nucleotide base encoding a protein comprising a mutation without generating a significant proportion of indels. An “indel” as used herein, refers to the insertion or deletion of a nucleotide base within a nucleic acid. Such insertions or deletions can lead to frame shift mutations within a coding region of a gene. In some embodiments, it is desirable to generate base editors that efficiently modify (e.g., mutate) a specific nucleotide within a nucleic acid, without generating a large number of insertions or deletions (i.e., indels) in the target nucleotide sequence. In certain embodiments, any of the base editors provided herein are capable of generating a greater proportion of intended modifications (e.g., point mutations or deaminations) versus indels.

[0596] In some embodiments, any of base editor systems provided herein result in less than 50%, less than 40%, less than 30%, less than 20%, less than 19%, less than 18%, less than 17%, less than 16%, less than 15%, less than 14%, less than 13%, less than 12%, less than 11%, less than 10%, less than 9%, less than 8%, less than 7%, less than 6%, less than 5%, less than 4%, less than 3%, less than 2%, less than 1%, less than 0.9%, less than 0.8%, less than 0.7%, less than 0.6%, less than 0.5%, less than 0.4%, less than 0.3%, less than 0.2%, less than 0.1%, less than 0.09%, less than 0.08%, less than 0.07%, less than 0.06%, less than 0.05%, less than 0.04%, less than 0.03%, less than 0.02%, or less than 0.01% indel formation in the target polynucleotide sequence.

[0597] In some embodiments, any of base editor systems comprising one of the ABE8 base editor variants described herein result in less than 50%, less than 40%, less than 30%, less than 20%, less than 19%, less than 18%, less than 17%, less than 16%, less than 15%, less than 14%, less than 13%, less than 12%, less than 11%, less than 10%, less than 9%, less than 8%, less than 7%, less than 6%, less than 5%, less than 4%, less than 3%, less than 2%, less than 1%, less than 0.9%, less than 0.8%, less than 0.7%, less than 0.6%, less than 0.5%, less than 0.4%, less than 0.3%, less than 0.2%, less than 0.1%, less than 0.09%, less than 0.08%, less than 0.07%, less than 0.06%, less than 0.05%, less than 0.04%, less than 0.03%, less than 0.02%, or less than 0.01% indel formation in the target polynucleotide sequence.

[0598] In some embodiments, any of base editor systems comprising one of the ABE8 base editor variants described herein result in less than 0.8% indel formation in the target polynucleotide sequence. In some embodiments, any of base editor systems comprising one of the ABE8 base editor variants described herein result in at most 0.8% indel formation in the target polynucleotide sequence. In some embodiments, any of base editor systems comprising one of the ABE8 base editor variants described herein result in less than 0.3% indel formation in the target polynucleotide sequence. In some embodiments, any of base editor systems comprising one of the ABE8 base editor variants described results in lower indel formation in the target polynucleotide sequence compared to a base editor system comprising one of ABET base editors. In some embodiments, any of base editor systems comprising one of the ABE8 base editor variants described herein results in lower indel formation in the target polynucleotide sequence compared to a base editor system comprising an ABE7.10.

[0599] In some embodiments, any of base editor systems comprising one of the ABE8 base editor variants described herein has reduction in indel frequency compared to a base editor system comprising one of the ABE7 base editors. In some embodiments, any of base editor systems comprising one of the ABE8 base editor variants described herein has at least 0.01%, at least 1%, at least 2%, at least 3%, at least 4%, at least 5%, at least 10%, at least 15%, at least 20%, at least 25%, at least 30%, at least 35%, at least 40%, at least 45%, at least 50%, at least 55%, at least 60%, at least 65%, at least 70%, at least 75%, at least 80%, at least 85%, at least 90%, or at least 95% reduction in indel frequency compared to a base editor system comprising one of the ABE7 base editors. In some embodiments, a base editor system comprising one of the ABE8 base editor variants described herein has at least 0.01%, at least 1%, at least 2%, at least 3%, at least 4%, at least 5%, at least 10%, at least 15%, at least 20%, at least 25%, at least 30%, at least 35%, at least 40%, at least 45%, at least 50%, at least 55%, at least 60%, at least 65%, at least 70%, at least 75%, at least 80%, at least 85%, at least 90%, or at least 95% reduction in indel frequency compared to a base editor system comprising an ABE7.10.

[0600] The disclosure provides adenosine deaminase variants (e.g., ABE8 variants) that have increased efficiency and specificity. In particular, the adenosine deaminase variants described herein are more likely to edit a desired base within a polynucleotide, and are less likely to edit bases that are not intended to be altered (e.g., “bystanders”).

[0601] In some embodiments, any of the base editing system comprising one of the ABE8 base editor variants described herein has reduced bystander editing or mutations. In some embodiments, an unintended editing or mutation is a bystander mutation or bystander editing, for example, base editing of a target base (e.g., A or C) in an unintended or non-target position in a target window of a target nucleotide sequence. In some embodiments, any of the base editing system comprising one of the ABE8 base editor variants described herein has reduced bystander editing or mutations compared to a base editor system comprising an ABE7 base editor, e.g., ABE7.10. In some embodiments, any of the base editing system comprising one of the ABE8 base editor variants described herein has reduced bystander editing or mutations by at least 1%, at least 2%, at least 3%, at least 4%, at least 5%, at least 10%, at least 15%, at least 20%, at least 25%, at least 30%, at least 35%, at least 40%, at least 45%, at least 50%, at least 55%, at least 60%, at least 65%, at least 70%, at least 75%, at least 80%, at least 85%, at least 90%, at least 95%, or at least 99% compared to a base editor system comprising an ABE7 base editor, e.g., ABE7.10. In some embodiments, any of the base editing system comprising one of the ABE8 base editor variants described herein has reduced bystander editing or mutations by at least 1.1 fold, at least 1.2 fold, at least 1.3 fold, at least 1.4 fold, at least 1.5 fold, at least 1.6 fold, at least 1.7 fold, at least 1.8 fold, at least 1.9 fold, at least 2.0 fold, at least 2.1 fold, at least 2.2 fold, at least 2.3 fold, at least 2.4 fold, at least 2.5 fold, at least 2.6 fold, at least 2.7 fold, at least 2.8 fold, at least 2.9 fold, or at least 3.0 fold compared to a base editor system comprising an ABE7 base editor, e.g., ABE7.10.

[0602] In some embodiments, any of the base editing system comprising one of the ABE8 base editor variants described herein has reduced spurious editing. In some embodiments, an unintended editing or mutation is a spurious mutation or spurious editing, for example, non-specific editing or guide independent editing of a target base (e.g., A or C) in an unintended or non-target region of the genome. In some embodiments, any of the base editing system comprising one of the ABE8 base editor variants described herein has reduced spurious editing compared to a base editor system comprising an ABE7 base editor, e.g., ABE7.10. In some embodiments, any of the base editing system comprising one of the ABE8 base editor variants described herein has reduced spurious editing by at least 1%, at least 2%, at least 3%, at least 4%, at least 5%, at least 10%, at least 15%, at least 20%, at least 25%, at least 30%, at least 35%, at least 40%, at least 45%, at least 50%, at least 55%, at least 60%, at least 65%, at least 70%, at least 75%, at least 80%, at least 85%, at least 90%, at least 95%, or at least 99% compared to a base editor system comprising an ABE7 base editor, e.g., ABE7.10. In some embodiments, any of the base editing system comprising one of the ABE8 base editor variants described herein has reduced spurious editing by at least 1.1 fold, at least 1.2 fold, at least 1.3 fold, at least 1.4 fold, at least 1.5 fold, at least 1.6 fold, at least 1.7 fold, at least 1.8 fold, at least 1.9 fold, at least 2.0 fold, at least 2.1 fold, at least 2.2 fold, at least 2.3 fold, at least 2.4 fold, at least 2.5 fold, at least 2.6 fold, at least 2.7 fold, at least 2.8 fold, at least 2.9 fold, or at least 3.0 fold compared to a base editor system comprising an ABE7 base editor, e.g., ABE7.10.

[0603] Some aspects of the disclosure are based on the recognition that any of the base editors provided herein are capable of efficiently generating an intended mutation, such as a point mutation, in a nucleic acid (e.g., a nucleic acid within a genome of a subject) without generating a significant number of unintended mutations, such as unintended point mutations i.e., mutation of bystanders). In some embodiments, any of the base editors provided herein are capable of generating at least 0.01% of intended mutations (i.e. at least 0.01% base editing efficiency). In some embodiments, any of the base editors provided herein are capable of generating at least 0.01%, 1%, 2%, 3%, 4%, 5%, 10%, 15%, 20%, 25%, 30%, 40%, 45%, 50%, 60%, 70%, 80%, 90%, 95%, or 99% of intended mutations.

[0604] In some embodiments, any of the ABE8 base editor variants described herein have at least 0.01%, at least 1%, at least 2%, at least 3%, at least 4%, at least 5%, at least 10%, at least 15%, at least 20%, at least 25%, at least 30%, at least 35%, at least 40%, at least 45%, at least 50%, at least 55%, at least 60%, at least 65%, at least 70%, at least 75%, at least 80%, at least 85%, at least 90%, at least 95%, or at least 99% base editing efficiency. In some embodiments, the base editing efficiency may be measured by calculating the percentage of edited nucleobases in a population of cells. In some embodiments, any of the ABE8 base editor variants described herein have base editing efficiency of at least 0.01%, at least 1%, at least 2%, at least 3%, at least 4%, at least 5%, at least 10%, at least 15%, at least 20%, at least 25%, at least 30%, at least 35%, at least 40%, at least 45%, at least 50%, at least 55%, at least 60%, at least 65%, at least 70%, at least 75%, at least 80%, at least 85%, at least 90%, at least 95%, or at least 99% as measured by edited nucleobases in a population of cells.

[0605] In some embodiments, any of the ABE8 base editor variants described herein has higher base editing efficiency compared to the ABE7 base editors. In some embodiments, any of the ABE8 base editor variants described herein have at least 1%, at least 2%, at least 3%, at least 4%, at least 5%, at least 10%, at least 15%, at least 20%, at least 25%, at least 30%, at least 35%, at least 40%, at least 45%, at least 50%, at least 55%, at least 60%, at least 65%, at least 70%, at least 75%, at least 80%, at least 85%, at least 90%, at least 95%, at least 99%, at least 100%, at least 105%, at least 110%, at least 115%, at least 120%, at least 125%, at least 130%, at least 135%, at least 140%, at least 145%, at least 150%, at least 155%, at least 160%, at least 165%, at least 170%, at least 175%, at least 180%, at least 185%, at least 190%, at least 195%, at least 200%, at least 210%, at least 220%, at least 230%, at least 240%, at least 250%, at least 260%, at least 270%, at least 280%, at least 290%, at least 300%, at least 310%, at least 320%, at least 330%, at least 340%, at least 350%, at least 360%, at least 370%, at least 380%, at least 390%, at least 400%, at least 450%, or at least 500% higher base editing efficiency compared to an ABE7 base editor, e.g., ABE7.10.

[0606] In some embodiments, any of the ABE8 base editor variants described herein has at least 1.1 fold, at least 1.2 fold, at least 1.3 fold, at least 1.4 fold, at least 1.5 fold, at least 1.6 fold, at least 1.7 fold, at least 1.8 fold, at least 1.9 fold, at least 2.0 fold, at least 2.1 fold, at least 2.2 fold, at least 2.3 fold, at least 2.4 fold, at least 2.5 fold, at least 2.6 fold, at least 2.7 fold, at least 2.8 fold, at least 2.9 fold, at least 3.0 fold, at least 3.1 fold, at least 3.2, at least 3.3 fold, at least 3.4 fold, at least 3.5 fold, at least 3.6 fold, at least 3.7 fold, at least 3.8 fold, at least 3.9 fold, at least 4.0 fold, at least 4.1 fold, at least 4.2 fold, at least 4.3 fold, at least 4.4 fold, at least 4.5 fold, at least 4.6 fold, at least 4.7 fold, at least 4.8 fold, at least 4.9 fold, or at least 5.0 fold higher base editing efficiency compared to an ABE7 base editor, e.g., ABE7.10.

[0607] In some embodiments, any of the ABE8 base editor variants described herein have at least 0.01%, at least 1%, at least 2%, at least 3%, at least 4%, at least 5%, at least 10%, at least 15%, at least 20%, at least 25%, at least 30%, at least 35%, at least 40%, at least 45%, at least 50%, at least 55%, at least 60%, at least 65%, at least 70%, at least 75%, at least 80%, at least 85%, at least 90%, at least 95%, or at least 99% on-target base editing efficiency. In some embodiments, any of the ABE8 base editor variants described herein have on-target base editing efficiency of at least 0.01%, at least 1%, at least 2%, at least 3%, at least 4%, at least 5%, at least 10%, at least 15%, at least 20%, at least 25%, at least 30%, at least 35%, at least 40%, at least 45%, at least 50%, at least 55%, at least 60%, at least 65%, at least 70%, at least 75%, at least 80%, at least 85%, at least 90%, at least 95%, or at least 99% as measured by edited target nucleobases in a population of cells.

[0608] In some embodiments, any of the ABE8 base editor variants described herein has higher on-target base editing efficiency compared to the ABE7 base editors. In some embodiments, any of the ABE8 base editor variants described herein have at least 1%, at least 2%, at least 3%, at least 4%, at least 5%, at least 10%, at least 15%, at least 20%, at least 25%, at least 30%, at least 35%, at least 40%, at least 45%, at least 50%, at least 55%, at least 60%, at least 65%, at least 70%, at least 75%, at least 80%, at least 85%, at least 90%, at least 95%, at least 99%, at least 100%, at least 105%, at least 110%, at least 115%, at least 120%, at least 125%, at least 130%, at least 135%, at least 140%, at least 145%, at least 150%, at least 155%, at least 160%, at least 165%, at least 170%, at least 175%, at least 180%, at least 185%, at least 190%, at least 195%, at least 200%, at least 210%, at least 220%, at least 230%, at least 240%, at least 250%, at least 260%, at least 270%, at least 280%, at least 290%, at least 300%, at least 310%, at least 320%, at least 330%, at least 340%, at least 350%, at least 360%, at least 370%, at least 380%, at least 390%, at least 400%, at least 450%, or at least 500% higher on-target base editing efficiency compared to an ABE7 base editor, e.g., ABE7.10.

[0609] In some embodiments, any of the ABE8 base editor variants described herein has at least 1.1 fold, at least 1.2 fold, at least 1.3 fold, at least 1.4 fold, at least 1.5 fold, at least 1.6 fold, at least 1.7 fold, at least 1.8 fold, at least 1.9 fold, at least 2.0 fold, at least 2.1 fold, at least 2.2 fold, at least 2.3 fold, at least 2.4 fold, at least 2.5 fold, at least 2.6 fold, at least 2.7 fold, at least 2.8 fold, at least 2.9 fold, at least 3.0 fold, at least 3.1 fold, at least 3.2 fold, at least 3.3 fold, at least 3.4 fold, at least 3.5 fold, at least 3.6 fold, at least 3.7 fold, at least 3.8 fold, at least 3.9 fold, at least 4.0 fold, at least 4.1 fold, at least 4.2 fold, at least 4.3 fold, at least 4.4 fold, at least 4.5 fold, at least 4.6 fold, at least 4.7 fold, at least 4.8 fold, at least 4.9 fold, or at least 5.0 fold higher on-target base editing efficiency compared to an ABET base editor, e.g., ABE7.10.

[0610] The ABE8 base editor variants described herein may be delivered to a host cell via a plasmid, a vector, a LNP complex, or an mRNA. In some embodiments, any of the ABE8 base editor variants described herein is delivered to a host cell as an mRNA. In some embodiments, an ABE8 base editor delivered via a nucleic acid based delivery system, e.g., an mRNA, has on-target editing efficiency of at least at least 1%, at least 2%, at least 3%, at least 4%, at least 5%, at least 10%, at least 15%, at least 20%, at least 25%, at least 30%, at least 35%, at least 40%, at least 45%, at least 50%, at least 55%, at least 60%, at least 65%, at least 70%, at least 75%, at least 80%, at least 85%, at least 90%, at least 95%, or at least 99% as measured by edited nucleobases. In some embodiments, an ABE8 base editor delivered by an mRNA system has higher base editing efficiency compared to an ABE8 base editor delivered by a plasmid or vector system. In some embodiments, any of the ABE8 base editor variants described herein has at least 1%, at least 2%, at least 3%, at least 4%, at least 5%, at least 10%, at least 15%, at least 20%, at least 25%, at least 30%, at least 35%, at least 40%, at least 45%, at least 50%, at least 55%, at least 60%, at least 65%, at least 70%, at least 75%, at least 80%, at least 85%, at least 90%, at least 95%, at least 99%, at least 100%, at least 105%, at least 110%, at least 115%, at least 120%, at least 125%, at least 130%, at least 135%, at least 140%, at least 145%, at least 150%, at least 155%, at least 160%, at least 165%, at least 170%, at least 175%, at least 180%, at least 185%, at least 190%, at least 195%, at least 200%, at least 210%, at least 220%, at least 230%, at least 240%, at least 250%, at least 260%, at least 270%, at least 280%, at least 290%, at least 300% higher, at least 310%, at least 320%, at least 330%, at least 340%, at least 350%, at least 360%, at least 370%, at least 380%, at least 390%, at least 400%, at least 450%, or at least 500% on-target editing efficiency when delivered by an mRNA system compared to when delivered by a plasmid or vector system. In some embodiments, any of the ABE8 base editor variants described herein has at least 1.1 fold, at least 1.2 fold, at least 1.3 fold, at least 1.4 fold, at least 1.5 fold, at least 1.6 fold, at least 1.7 fold, at least 1.8 fold, at least 1.9 fold, at least 2.0 fold, at least 2.1 fold, at least 2.2 fold, at least 2.3 fold, at least 2.4 fold, at least 2.5 fold, at least 2.6 fold, at least 2.7 fold, at least 2.8 fold, at least 2.9 fold, at least 3.0 fold, at least 3.1 fold, at least 3.2 fold, at least 3.3 fold, at least 3.4 fold, at least 3.5 fold, at least 3.6 fold, at least 3.7 fold, at least 3.8 fold, at least 3.9 fold, at least 4.0 fold, at least 4.1 fold, at least 4.2 fold, at least 4.3 fold, at least 4.4 fold, at least 4.5 fold, at least 4.6 fold, at least 4.7 fold, at least 4.8 fold, at least 4.9 fold, or at least 5.0 fold higher on-target editing efficiency when delivered by an mRNA system compared to when delivered by a plasmid or vector system.

[0611] In some embodiments, any of base editor systems comprising one of the ABE8 base editor variants described herein result in less than 50%, less than 40%, less than 30%, less than 20%, less than 19%, less than 18%, less than 17%, less than 16%, less than 15%, less than 14%, less than 13%, less than 12%, less than 11%, less than 10%, less than 9%, less than 8%, less than 7%, less than 6%, less than 5%, less than 4%, less than 3%, less than 2%, less than 1%, less than 0.9%, less than 0.8%, less than 0.7%, less than 0.6%, less than 0.5%, less than 0.4%, less than 0.3%, less than 0.2%, less than 0.1%, less than 0.09%, less than 0.08%, less than 0.07%, less than 0.06%, less than 0.05%, less than 0.04%, less than 0.03%, less than 0.02%, or less than 0.01% off-target editing in the target polynucleotide sequence.

[0612] In some embodiments, any of the ABE8 base editor variants described herein has lower guided off-target editing efficiency when delivered by an mRNA system compared to when delivered by a plasmid or vector system. In some embodiments, any of the ABE8 base editor variants described herein has at least 1%, at least 2%, at least 3%, at least 4%, at least 5%, at least 10%, at least 15%, at least 20%, at least 25%, at least 30%, at least 35%, at least 40%, at least 45%, at least 50%, at least 55%, at least 60%, at least 65%, at least 70%, at least 75%, at least 80%, at least 85%, at least 90%, at least 95%, or at least 99% lower guided off-target editing efficiency when delivered by an mRNA system compared to when delivered by a plasmid or vector system. In some embodiments, any of the ABE8 base editor variants described herein has at least 1.1 fold, at least 1.2 fold, at least 1.3 fold, at least 1.4 fold, at least 1.5 fold, at least 1.6 fold, at least 1.7 fold, at least 1.8 fold, at least 1.9 fold, at least 2.0 fold, at least 2.1 fold, at least 2.2 fold, at least 2.3 fold, at least 2.4 fold, at least 2.5 fold, at least 2.6 fold, at least 2.7 fold, at least 2.8 fold, at least 2.9 fold, or at least 3.0 fold lower guided off-target editing efficiency when delivered by an mRNA system compared to when delivered by a plasmid or vector system. In some embodiments, any of the ABE8 base editor variants described herein has at least about 2.2 fold decrease in guided off-target editing efficiency when delivered by an mRNA system compared to when delivered by a plasmid or vector system.

[0613] In some embodiments, any of the ABE8 base editor variants described herein has lower guide-independent off-target editing efficiency when delivered by an mRNA system compared to when delivered by a plasmid or vector system. In some embodiments, any of the ABE8 base editor variants described herein has at least 1%, at least 2%, at least 3%, at least 4%, at least 5%, at least 10%, at least 15%, at least 20%, at least 25%, at least 30%, at least 35%, at least 40%, at least 45%, at least 50%, at least 55%, at least 60%, at least 65%, at least 70%, at least 75%, at least 80%, at least 85%, at least 90%, at least 95%, or at least 99% lower guide-independent off-target editing efficiency when delivered by an mRNA system compared to when delivered by a plasmid or vector system. In some embodiments, any of the ABE8 base editor variants described herein has at least 1.1 fold, at least 1.2 fold, at least 1.3 fold, at least 1.4 fold, at least 1.5 fold, at least 1.6 fold, at least 1.7 fold, at least 1.8 fold, at least 1.9 fold, at least 2.0 fold, at least 2.1 fold, at least 2.2 fold, at least 2.3 fold, at least 2.4 fold, at least 2.5 fold, at least 2.6 fold, at least 2.7 fold, at least 2.8 fold, at least 2.9 fold, at least 3.0 fold, at least 5.0 fold, at least 10.0 fold, at least 20.0 fold, at least 50.0 fold, at least 70.0 fold, at least 100.0 fold, at least 120.0 fold, at least 130.0 fold, or at least 150.0 fold lower guide-independent off-target editing efficiency when delivered by an mRNA system compared to when delivered by a plasmid or vector system. In some embodiments, ABE8 base editor variants described herein has 134.0 fold decrease in guide-independent off-target editing efficiency (e.g., spurious RNA deamination) when delivered by an mRNA system compared to when delivered by a plasmid or vector system. In some embodiments, ABE8 base editor variants described herein does not increase guide-independent mutation rates across the genome.

[0614] Some aspects of the disclosure are based on the recognition that any of the base editors provided herein are capable of efficiently generating an intended mutation, such as a point mutation, in a nucleic acid (e.g., a nucleic acid within a genome of a subject) without generating a significant number of unintended mutations (e.g., spurious off-target editing or bystander editing). In some embodiments, an intended mutation is a mutation that is generated by a specific base editor bound to a gRNA, specifically designed to alter or correct a mutation in a target gene. Some aspects of the disclosure are based on the recognition that any of the base editors provided herein are capable of efficiently generating an intended mutation in a nucleic acid (e.g. a nucleic acid within a genome of a subject) without generating a significant number of unintended mutations. In some embodiments, an intended mutation is a mutation that is generated by a specific base editor bound to a gRNA, specifically designed to alter or correct an intended mutation. In some embodiments, the intended mutation is a mutation that generates a stop codon, for example, a premature stop codon within the coding region of a gene. In some embodiments, the intended mutation is a mutation that eliminates a stop codon. In some embodiments, the intended mutation is a mutation that alters the splicing of a gene. In some embodiments, the intended mutation is a mutation that alters the regulatory sequence of a gene (e.g., a gene promotor or gene repressor).

[0615] In some embodiments, the base editors provided herein are capable of generating a ratio of intended point mutations to indels (i.e., unintended mutations) that is greater than 1:1. In some embodiments, the base editors provided herein are capable of generating a ratio of intended mutations to indels that is at least 1.5:1, at least 2:1, at least 2.5:1, at least 3:1, at least 3.5:1, at least 4:1, at least 4.5:1, at least 5:1, at least 5.5:1, at least 6:1, at least 6.5:1, at least 7:1, at least 7.5:1, at least 8:1, at least 8.5:1, at least 9:1, at least 10:1, at least 11:1, at least 12:1, at least 13:1, at least 14:1, at least 15:1, at least 20:1, at least 25:1, at least 30:1, at least 40:1, at least 50:1, at least 100:1, at least 200:1, at least 300:1, at least 400:1, at least 500:1, at least 600:1, at least 700:1, at least 800:1, at least 900:1, or at least 1000:1, or more. It should be appreciated that the characteristics of the base editors described herein may be applied to any of the fusion proteins, or methods of using the fusion proteins provided herein.

[0616] The number of intended mutations and indels can be determined using any suitable method, for example, as described in International PCT Application Nos. PCT/2017/045381 (WO 2018/027078) and PCT/US2016/058344 (WO 2017/070632); Komor, A. C., et al., “Programmable editing of a target base in genomic DNA without double-stranded DNA cleavage” Nature 533, 420-424 (2016); Gaudelli, N. M., et al., “Programmable base editing of A⋅T to G⋅C in genomic DNA without DNA cleavage” Nature 551, 464-471 (2017); and Komor, A. C., et al., “Improved base excision repair inhibition and bacteriophage Mu Gam protein yields C:G-to-T:A base editors with higher efficiency and product purity” Science Advances 3:eaao4774 (2017); the entire contents of which are hereby incorporated by reference.

[0617] In some embodiments, to calculate indel frequencies, sequencing reads are scanned for exact matches to two 10-bp sequences that flank both sides of a window in which indels can occur. If no exact matches are located, the read is excluded from analysis. If the length of this indel window exactly matches the reference sequence the read is classified as not containing an indel. If the indel window is two or more bases longer or shorter than the reference sequence, then the sequencing read is classified as an insertion or deletion, respectively. In some embodiments, the base editors provided herein can limit formation of indels in a region of a nucleic acid. In some embodiments, the region is at a nucleotide targeted by a base editor or a region within 2, 3, 4, 5, 6, 7, 8, 9, or 10 nucleotides of a nucleotide targeted by a base editor.

[0618] The number of indels formed at a target nucleotide region can depend on the amount of time a nucleic acid (e.g., a nucleic acid within the genome of a cell) is exposed to a base editor. In some embodiments, the number or proportion of indels is determined after at least 1 hour, at least 2 hours, at least 6 hours, at least 12 hours, at least 24 hours, at least 36 hours, at least 48 hours, at least 3 days, at least 4 days, at least 5 days, at least 7 days, at least 10 days, or at least 14 days of exposing the target nucleotide sequence (e.g., a nucleic acid within the genome of a cell) to a base editor. It should be appreciated that the characteristics of the base editors as described herein can be applied to any of the fusion proteins, or methods of using the fusion proteins provided herein.

[0619] In some embodiments, the base editors provided herein are capable of limiting formation of indels in a region of a nucleic acid. In some embodiments, the region is at a nucleotide targeted by a base editor or a region within 2, 3, 4, 5, 6, 7, 8, 9, or 10 nucleotides of a nucleotide targeted by a base editor. In some embodiments, any of the base editors provided herein are capable of limiting the formation of indels at a region of a nucleic acid to less than 1%, less than 1.5%, less than 2%, less than 2.5%, less than 3%, less than 3.5%, less than 4%, less than 4.5%, less than 5%, less than 6%, less than 7%, less than 8%, less than 9%, less than 10%, less than 12%, less than 15%, or less than 20%. The number of indels formed at a nucleic acid region may depend on the amount of time a nucleic acid (e.g., a nucleic acid within the genome of a cell) is exposed to a base editor. In some embodiments, any number or proportion of indels is determined after at least 1 hour, at least 2 hours, at least 6 hours, at least 12 hours, at least 24 hours, at least 36 hours, at least 48 hours, at least 3 days, at least 4 days, at least 5 days, at least 7 days, at least 10 days, or at least 14 days of exposing a nucleic acid (e.g., a nucleic acid within the genome of a cell) to a base editor.

### Multiplex Editing

[0620] In some embodiments, the base editor system provided herein is capable of multiplex editing of a plurality of nucleobase pairs in one or more genes. In some embodiments, the plurality of nucleobase pairs is located in the same gene. In some embodiments, the plurality of nucleobase pairs is located in one or more gene, wherein at least one gene is located in a different locus. In some embodiments, the multiplex editing can comprise one or more guide polynucleotides. In some embodiments, the multiplex editing can comprise one or more base editor systems. In some embodiments, the multiplex editing can comprise one or more base editor systems with a single guide polynucleotide. In some embodiments, the multiplex editing can comprise one or more base editor systems with a plurality of guide polynucleotides. In some embodiments, the multiplex editing can comprise one or more guide polynucleotides with a single base editor system. In some embodiments, the multiplex editing can comprise at least one guide polynucleotide that does not require a PAM sequence to target binding to a target polynucleotide sequence. In some embodiments, the multiplex editing can comprise at least one guide polynucleotide that require a PAM sequence to target binding to a target polynucleotide sequence. In some embodiments, the multiplex editing can comprise a mix of at least one guide polynucleotide that does not require a PAM sequence to target binding to a target polynucleotide sequence and at least one guide polynucleotide that require a PAM sequence to target binding to a target polynucleotide sequence. It should be appreciated that the characteristics of the multiplex editing using any of the base editors as described herein can be applied to any combination of methods using any base editor provided herein. It should also be appreciated that the multiplex editing using any of the base editors as described herein can comprise a sequential editing of a plurality of nucleobase pairs.

[0621] In some embodiments, the plurality of nucleobase pairs is in one or more genes. In some embodiments, the plurality of nucleobase pairs are in the same gene. In some embodiments, at least one gene in the one or more genes is located in a different locus. In some embodiments, the editing is editing of the plurality of nucleobase pairs in at least one protein coding region. In some embodiments, the editing is editing of the plurality of nucleobase pairs in at least one protein non-coding region. In some embodiments, the editing is editing of the plurality of nucleobase pairs in at least one protein coding region and at least one protein non-coding region.

[0622] In some embodiments, the editing is in conjunction with one or more guide polynucleotides. In some embodiments, the base editor system can comprise one or more base editor system. In some embodiments, the base editor system can comprise one or more base editor systems in conjunction with a single guide polynucleotide. In some embodiments, the base editor system can comprise one or more base editor system in conjunction with a plurality of guide polynucleotides. In some embodiments, the editing is in conjunction with one or more guide polynucleotide with a single base editor system. In some embodiments, the editing is in conjunction with at least one guide polynucleotide that does not require a PAM sequence to target binding to a target polynucleotide sequence. In some embodiments, the editing is in conjunction with at least one guide polynucleotide that require a PAM sequence to target binding to a target polynucleotide sequence. In some embodiments, the editing is in conjunction with a mix of at least one guide polynucleotide that does not require a PAM sequence to target binding to a target polynucleotide sequence and at least one guide polynucleotide that require a PAM sequence to target binding to a target polynucleotide sequence. It should be appreciated that the characteristics of the multiplex editing using any of the base editors as described herein can be applied to any of combination of the methods of using any of the base editors provided herein. It should also be appreciated that the editing can comprise a sequential editing of a plurality of nucleobase pairs.

[0623] In some embodiments, the base editor system capable of multiplex editing of a plurality of nucleobase pairs in one or more genes comprises one of the ABE8 base editor variants described herein. In some embodiments, the base editor system capable of multiplex editing of a plurality of nucleobase pairs in one or more genes comprises one of ABE7 base editors. In some embodiments, the base editor system capable of multiplex editing comprising one of the ABE8 base editor variants described herein has higher multiplex editing efficiency compared the base editor system capable of multiplex editing comprising one of ABE7 base editors. In some embodiments, the base editor system capable of multiplex editing comprising one of the ABE8 base editor variants described herein has at least 1%, at least 2%, at least 3%, at least 4%, at least 5%, at least 10%, at least 15%, at least 20%, at least 25%, at least 30%, at least 35%, at least 40%, at least 45%, at least 50%, at least 55%, at least 60%, at least 65%, at least 70%, at least 75%, at least 80%, at least 85%, at least 90%, at least 95%, at least 99%, at least 100%, at least 105%, at least 110%, at least 115%, at least 120%, at least 125%, at least 130%, at least 135%, at least 140%, at least 145%, at least 150%, at least 155%, at least 160%, at least 165%, at least 170%, at least 175%, at least 180%, at least 185%, at least 190%, at least 195%, at least 200%, at least 210%, at least 220%, at least 230%, at least 240%, at least 250%, at least 260%, at least 270%, at least 280%, at least 290%, at least 300% higher, at least 310%, at least 320%, at least 330%, at least 340%, at least 350%, at least 360%, at least 370%, at least 380%, at least 390%, at least 400%, at least 450%, or at least 500% higher multiplex editing efficiency compared the base editor system capable of multiplex editing comprising one of ABE7 base editors. In some embodiments, the base editor system capable of multiplex editing comprising one of the ABE8 base editor variants described herein has at least 1.1 fold, at least 1.2 fold, at least 1.3 fold, at least 1.4 fold, at least 1.5 fold, at least 1.6 fold, at least 1.7 fold, at least 1.8 fold, at least 1.9 fold, at least 2.0 fold, at least 2.1 fold, at least 2.2 fold, at least 2.3 fold, at least 2.4 fold, at least 2.5 fold, at least 2.6 fold, at least 2.7 fold, at least 2.8 fold, at least 2.9 fold, at least 3.0 fold, at least 3.1 fold, at least 3.2 fold, at least 3.3 fold, at least 3.4 fold, at least 3.5 fold, at least 4.0 fold, at least 4.5 fold, at least 5.0 fold, at least 5.5 fold, or at least 6.0 fold higher multiplex editing efficiency compared the base editor system capable of multiplex editing comprising one of ABE7 base editors.

### Methods for Editing Nucleic Acids

[0624] Some aspects of the disclosure provide methods for editing a nucleic acid. In some embodiments, the method is a method for editing a nucleobase of a nucleic acid molecule encoding a protein (e.g., a base pair of a double-stranded DNA sequence). In some embodiments, the method comprises the steps of: a) contacting a target region of a nucleic acid (e.g., a double-stranded DNA sequence) with a complex comprising a base editor and a guide nucleic acid (e.g., gRNA), b) inducing strand separation of said target region, c) converting a first nucleobase of said target nucleobase pair in a single strand of the target region to a second nucleobase, and d) cutting no more than one strand of said target region using the nCas9, where a third nucleobase complementary to the first nucleobase base is replaced by a fourth nucleobase complementary to the second nucleobase. In some embodiments, the method results in less than 20% indel formation in the nucleic acid. It should be appreciated that in some embodiments, step b is omitted. In some embodiments, the method results in less than 19%, 18%, 16%, 14%, 12%, 10%, 8%, 6%, 4%, 2%, 1%, 0.5%, 0.2%, or less than 0.1% indel formation. In some embodiments, the method further comprises replacing the second nucleobase with a fifth nucleobase that is complementary to the fourth nucleobase, thereby generating an intended edited base pair (e.g., G⋅C to A⋅T). In some embodiments, at least 5% of the intended base pairs are edited. In some embodiments, at least 10%, 15%, 20%, 25%, 30%, 35%, 40%, 45%, or 50% of the intended base pairs are edited.

[0625] In some embodiments, the ratio of intended products to unintended products in the target nucleotide is at least 2:1, 5:1, 10:1, 20:1, 30:1, 40:1, 50:1, 60:1, 70:1, 80:1, 90:1, 100:1, or 200:1, or more. In some embodiments, the ratio of intended mutation to indel formation is greater than 1:1, 10:1, 50:1, 100:1, 500:1, or 1000:1, or more. In some embodiments, the cut single strand (nicked strand) is hybridized to the guide nucleic acid. In some embodiments, the cut single strand is opposite to the strand comprising the first nucleobase. In some embodiments, the base editor comprises a dCas9 domain. In some embodiments, the base editor protects or binds the non-edited strand. In some embodiments, the intended edited base pair is upstream of a PAM site. In some embodiments, the intended edited base pair is 1, 2, 3, 4, 5, 6, 7, 8, 9, 10, 11, 12, 13, 14, 15, 16, 17, 18, 19, or 20 nucleotides upstream of the PAM site. In some embodiments, the intended edited base pair is downstream of a PAM site. In some embodiments, the intended edited base pair is 1, 2, 3, 4, 5, 6, 7, 8, 9, 10, 11, 12, 13, 14, 15, 16, 17, 18, 19, or 20 nucleotides downstream stream of the PAM site. In some embodiments, the method does not require a canonical (e.g., NGG) PAM site. In some embodiments, the nucleobase editor comprises a linker. In some embodiments, the linker is 1-25 amino acids in length. In some embodiments, the linker is 5-20 amino acids in length. In some embodiments, linker is 10, 11, 12, 13, 14, 15, 16, 17, 18, 19, or 20 amino acids in length. In one embodiment, the linker is 32 amino acids in length. In another embodiment, a “long linker” is at least about 60 amino acids in length. In other embodiments, the linker is between about 3-100 amino acids in length. In some embodiments, the target region comprises a target window, wherein the target window comprises the target nucleobase pair. In some embodiments, the target window comprises 1-10 nucleotides. In some embodiments, the target window is 1-9, 1-8, 1-7, 1-6, 1-5, 1-4, 1-3, 1-2, or 1 nucleotides in length. In some embodiments, the target window is 1, 2, 3, 4, 5, 6, 7, 8, 9, 10, 11, 12, 13, 14, 15, 16, 17, 18, 19, or 20 nucleotides in length. In some embodiments, the intended edited base pair is within the target window. In some embodiments, the target window comprises the intended edited base pair. In some embodiments, the method is performed using any of the base editors provided herein.

[0626] In some embodiments, the disclosure provides methods for editing a nucleotide (e.g., SNP in a gene encoding a protein). In some embodiments, the disclosure provides a method for editing a nucleobase pair of a double-stranded DNA sequence. In some embodiments, the method comprises a) contacting a target region of the double-stranded DNA sequence with a complex comprising a base editor and a guide nucleic acid (e.g., gRNA), where the target region comprises a target nucleobase pair, b) inducing strand separation of said target region, c) converting a first nucleobase of said target nucleobase pair in a single strand of the target region to a second nucleobase, d) cutting no more than one strand of said target region, wherein a third nucleobase complementary to the first nucleobase base is replaced by a fourth nucleobase complementary to the second nucleobase, and the second nucleobase is replaced with a fifth nucleobase that is complementary to the fourth nucleobase, thereby generating an intended edited base pair, wherein the efficiency of generating the intended edited base pair is at least 5%. It should be appreciated that in some embodiments, step b is omitted. In some embodiments, at least 5% of the intended base pairs are edited. In some embodiments, at least 10%, 15%, 20%, 25%, 30%, 35%, 40%, 45%, or 50% of the intended base pairs are edited. In some embodiments, the method causes less than 19%, 18%, 16%, 14%, 12%, 10%, 8%, 6%, 4%, 2%, 1%, 0.5%, 0.2%, or less than 0.1% indel formation. In some embodiments, the ratio of intended product to unintended products at the target nucleotide is at least 2:1, 5:1, 10:1, 20:1, 30:1, 40:1, 50:1, 60:1, 70:1, 80:1, 90:1, 100:1, or 200:1, or more. In some embodiments, the ratio of intended mutation to indel formation is greater than 1:1, 10:1, 50:1, 100:1, 500:1, or 1000:1, or more. In some embodiments, the cut single strand is hybridized to the guide nucleic acid. In some embodiments, the cut single strand is opposite to the strand comprising the first nucleobase. In some embodiments, the intended edited base pair is upstream of a PAM site. In some embodiments, the intended edited base pair is 1, 2, 3, 4, 5, 6, 7, 8, 9, 10, 11, 12, 13, 14, 15, 16, 17, 18, 19, or 20 nucleotides upstream of the PAM site. In some embodiments, the intended edited base pair is downstream of a PAM site. In some embodiments, the intended edited base pair is 1, 2, 3, 4, 5, 6, 7, 8, 9, 10, 11, 12, 13, 14, 15, 16, 17, 18, 19, or 20 nucleotides downstream stream of the PAM site. In some embodiments, the method does not require a canonical (e.g., NGG) PAM site. In some embodiments, the linker is 1-25 amino acids in length. In some embodiments, the linker is 5-20 amino acids in length. In some embodiments, the linker is 10, 11, 12, 13, 14, 15, 16, 17, 18, 19, or 20 amino acids in length. In some embodiments, the target region comprises a target window, wherein the target window comprises the target nucleobase pair. In some embodiments, the target window comprises 1-10 nucleotides. In some embodiments, the target window is 1-9, 1-8, 1-7, 1-6, 1-5, 1-4, 1-3, 1-2, or 1 nucleotides in length. In some embodiments, the target window is 1, 2, 3, 4, 5, 6, 7, 8, 9, 10, 11, 12, 13, 14, 15, 16, 17, 18, 19, or 20 nucleotides in length. In some embodiments, the intended edited base pair occurs within the target window. In some embodiments, the target window comprises the intended edited base pair. In some embodiments, the nucleobase editor is any one of the base editors provided herein.

### Expression of Fusion Proteins in a Host Cell

[0627] Fusion proteins of the disclosure comprising an adenosine deaminase variant may be expressed in virtually any host cell of interest, including but not limited to bacteria, yeast, fungi, insects, plants, and animal cells using routine methods known to the skilled artisan. For example, a DNA encoding an adenosine deaminase of the disclosure can be cloned by designing suitable primers for the upstream and downstream of CDS based on the cDNA sequence. The cloned DNA may be directly, or after digestion with a restriction enzyme when desired, or after addition of a suitable linker and/or a nuclear localization signal ligated with a DNA encoding one or more additional components of a base editing system. The base editing system is translated in a host cell to form a complex.

[0628] A DNA encoding a protein domain described herein can be obtained by chemically synthesizing the DNA, or by connecting synthesized partly overlapping oligoDNA short chains by utilizing the PCR method and the Gibson Assembly method to construct a DNA encoding the full length thereof. The advantage of constructing a full-length DNA by chemical synthesis or a combination of PCR method or Gibson Assembly method is that the codon to be used can be designed in CDS full-length according to the host into which the DNA is introduced. In the expression of a heterologous DNA, the protein expression level is expected to increase by converting the DNA sequence thereof to a codon highly frequently used in the host organism. As the data of codon use frequency in host to be used, for example, the genetic code use frequency database (http://www.kazusa.or.jp/codon/index.html) disclosed in the home page of Kazusa DNA Research Institute can be used, or documents showing the codon use frequency in each host may be referred to. By reference to the obtained data and the DNA sequence to be introduced, codons showing low use frequency in the host from among those used for the DNA sequence may be converted to a codon coding the same amino acid and showing high use frequency.

[0629] An expression vector containing a DNA encoding a nucleic acid sequence-recognizing module and/or a nucleic acid base converting enzyme can be produced, for example, by linking the DNA to the downstream of a promoter in a suitable expression vector.

[0630] When the expression vectors are Escherichia coli-derived plasmids (e.g., pBR322, pBR325, pUC12, pUC13); Bacillus subtilis-derived plasmids (e.g., pUB110, pTP5, pC194); yeast-derived plasmids (e.g., pSH19, pSH15); insect cell expression plasmids (e.g., pFast-Bac); animal cell expression plasmids (e.g., pA1-11, pXT1, pRc/CMV, pRc/RSV, pcDNAI/Neo); bacteriophages such as .lamda.phage and the like; insect virus vectors such as baculovirus and the like (e.g., BmNPV, AcNPV); animal virus vectors such as retrovirus, vaccinia virus, adenovirus and the like are used.

[0631] In some embodiments, any promoter appropriate for a host to be used for gene expression can be used. In a conventional method using DSB, since the survival rate of the host cell sometimes decreases markedly due to the toxicity, it is desirable to increase the number of cells by the start of the induction by using an inductive promoter. However, since sufficient cell proliferation can also be afforded by expressing the nucleic acid-modifying enzyme complex of the present disclosure, a constitution promoter can also be used without limitation.

[0632] For example, when the host is an animal cell, SRα promoter, SV40 promoter, LTR promoter, CMV (cytomegalovirus) promoter, RSV (Rous sarcoma virus) promoter, MoMuLV (Moloney mouse leukemia virus) LTR, HSV-TK (simple herpes virus thymidine kinase) promoter and the like are used. Of these, CMV promoter, SRα promoter and the like are preferable.

[0633] When the host is Escherichia coli, trp promoter, lac promoter, recA promoter, λP_{L} promoter, 1pp promoter, T7 promoter and the like are preferable.

[0634] When the host is genus Bacillus, SPO1 promoter, SPO2 promoter, penP promoter and the like are preferable.

[0635] When the host is a yeast, Gal1/10 promoter, PHO5 promoter, PGK promoter, GAP promoter, ADH promoter and the like are preferable.

[0636] When the host is an insect cell, polyhedrin promoter, P10 promoter and the like are preferable.

[0637] When the host is a plant cell, CaMV35S promoter, CaMV19S promoter, NOS promoter and the like are preferable.

[0638] As the expression vector, besides those mentioned above, one containing enhancer, splicing signal, terminator, polyA addition signal, a selection marker such as drug resistance gene, auxotrophic complementary gene and the like, replication origin and the like on demand can be used.

[0639] An RNA encoding a protein domain described herein can be prepared by, for example, transcription to mRNA in a vitro transcription system known per se by using a vector encoding DNA encoding the above-mentioned nucleic acid sequence-recognizing module and/or a nucleic acid base converting enzyme as a template.

[0640] A fusion protein of the disclosure can be intracellularly expressed by introducing an expression vector containing a DNA encoding a nucleic acid sequence-recognizing module and/or a nucleic acid base converting enzyme into a host cell, and culturing the host cell.

[0641] As the host, genus Escherichia, genus Bacillus, yeast, insect cell, insect, animal cell and the like are used.

[0642] As the genus Escherichia, Escherichia coli K12.cndot.DH1 (Proc. Natl. Acad. Sci. USA, 60, 160 (1968)), Escherichia coli JM103 (Nucleic Acids Research, 9, 309 (1981)), Escherichia coli JA221 (Journal of Molecular Biology, 120, 517 (1978)), Escherichia coli HB101 (Journal of Molecular Biology, 41, 459 (1969)), Escherichia coli C600 (Genetics, 39, 440 (1954)) and the like are used.

[0643] As the genus Bacillus, Bacillus subtilis M1114 (Gene, 24, 255 (1983)), Bacillus subtilis 207-21 (Journal of Biochemistry, 95, 87 (1984)) and the like are used.

[0644] As the yeast, Saccharomyces cerevisiae AH22, AH22R⁻, NA87-11A, DKD-5D, 20B-12, Schizosaccharomyces pombe NCYC1913, NCYC2036, Pichia pastoris KM71 and the like are used.

[0645] As the insect cell when the virus is AcNPV, cells of cabbage armyworm larva-derived established line (Spodoptera frugiperda cell; Sf cell), MG1 cells derived from the mid-intestine of Trichoplusia ni, High Five™ cells derived from an egg of Trichoplusia ni, Mamestra brassicae-derived cells, Estigmena acrea-derived cells and the like are used. When the virus is BmNPV, cells of Bombyx mori-derived established line (Bombyx mori N cell; BmN cell) and the like are used as insect cells. As the Sf cell, for example, Sf9 cell (ATCC CRL1711), Sf21 cell (all above, In Vivo, 13, 213-217 (1977)) and the like are used.

[0646] As the insect, for example, larva of Bombyx mori, Drosophila, cricket and the like are used (Nature, 315, 592 (1985)).

[0647] As the animal cell, cell lines such as monkey COS-7 cell, monkey Vero cell, Chinese hamster ovary (CHO) cell, dhfr gene-deficient CHO cell, mouse L cell, mouse AtT-20 cell, mouse myeloma cell, rat GH3 cell, human FL cell and the like, pluripotent stem cells such as iPS cell, ES cell and the like of human and other mammals, and primary cultured cells prepared from various tissues are used. Furthermore, zebrafish embryo, Xenopus oocyte and the like can also be used.

[0648] As the plant cell, suspend cultured cells, callus, protoplast, leaf segment, root segment and the like prepared from various plants (e.g., grain such as rice, wheat, corn and the like, product crops such as tomato, cucumber, eggplant and the like, garden plants such as carnation, Eustoma russellianum and the like, experiment plants such as tobacco, Arabidopsis thaliana and the like) are used.

[0649] All the above-mentioned host cells may be haploid (monoploid), or polyploid (e.g., diploid, triploid, tetraploid and the like). In the conventional mutation introduction methods, mutation is, in principle, introduced into only one homologous chromosome to produce a hetero gene type. Therefore, desired phenotype is not expressed unless dominant mutation occurs, and homozygousness inconveniently requires labor and time. In contrast, according to the present disclosure, since mutation can be introduced into any allele on the homologous chromosome in the genome, desired phenotype can be expressed in a single generation even in the case of recessive mutation, which is extremely useful since the problem of the conventional method can be solved.

[0650] An expression vector can be introduced by a known method (e.g., lysozyme method, competent method, PEG method, CaCl₂ coprecipitation method, electroporation method, the microinjection method, the particle gun method, lipofection method, Agrobacterium method and the like) according to the kind of the host.

[0651] Escherichia coli can be transformed according to the methods described in, for example, Proc. Natl. Acad. Sci. USA, 69, 2110 (1972), Gene, 17, 107 (1982) and the like.

[0652] The genus Bacillus can be introduced into a vector according to the methods described in, for example, Molecular & General Genetics, 168, 111 (1979) and the like.

[0653] A yeast can be introduced into a vector according to the methods described in, for example, Methods in Enzymology, 194, 182-187 (1991), Proc. Natl. Acad. Sci. USA, 75, 1929 (1978) and the like.

[0654] An insect cell and an insect can be introduced into a vector according to the methods described in, for example, Bio/Technology, 6, 47-55 (1988) and the like.

[0655] An animal cell can be introduced into a vector according to the methods described in, for example, Cell Engineering additional volume 8, New Cell Engineering Experiment Protocol, 263-267 (1995) (published by Shujunsha), and Virology, 52, 456 (1973).

[0656] A cell introduced with a vector can be cultured according to a known method according to the kind of the host.

[0657] For example, when Escherichia coli or genus Bacillus is cultured, a liquid medium is preferable as a medium to be used for the culture. The medium preferably contains a carbon source, nitrogen source, inorganic substance and the like necessary for the growth of the transformant. Examples of the carbon source include glucose, dextrin, soluble starch, sucrose and the like; examples of the nitrogen source include inorganic or organic substances such as ammonium salts, nitrate salts, corn steep liquor, peptone, casein, meat extract, soybean cake, potato extract and the like; and examples of the inorganic substance include calcium chloride, sodium dihydrogen phosphate, magnesium chloride and the like. The medium may contain yeast extract, vitamins, growth promoting factor and the like. The pH of the medium is preferably about 5 to about 8.

[0658] As a medium for culturing Escherichia coli, for example, M9 medium containing glucose, casamino acid (Journal of Experiments in Molecular Genetics, 431-433, Cold Spring Harbor Laboratory, New York 1972) is preferable. Where necessary, for example, agents such as 3β-indolylacrylic acid may be added to the medium to ensure an efficient function of a promoter. Escherichia coli is cultured at generally about 15 to about 43° C. Where necessary, aeration and stirring may be performed.

[0659] The genus Bacillus is cultured at generally about 30° C. to about 40° C. Where necessary, aeration and stirring may be performed.

[0660] Examples of the medium for culturing yeast include Burkholder minimum medium (Proc. Natl. Acad. Sci. USA, 77, 4505 (1980)), SD medium containing 0.5% casamino acid (Proc. Natl. Acad. Sci. USA, 81, 5330 (1984)) and the like. The pH of the medium is preferably about 5 to about 8. The culture is performed at generally about 20° C. to about 35° C. Where necessary, aeration and stirring may be performed.

[0661] As a medium for culturing an insect cell or insect, for example, Grace's Insect Medium (Nature, 195, 788 (1962)) containing an additive such as inactivated 10% bovine serum and the like as appropriate and the like are used. The pH of the medium is preferably about 6.2 to about 6.4. The culture is performed at generally about 27° C. Where necessary, aeration and stirring may be performed.

[0662] As a medium for culturing an animal cell, for example, minimum essential medium (MEM) containing about 5 to about 20% of fetal bovine serum (Science, 122, 501 (1952)), Dulbecco's modified Eagle medium (DMEM) (Virology, 8, 396 (1959)), RPMI 1640 medium (The Journal of the American Medical Association, 199, 519 (1967)), 199 medium (Proceeding of the Society for the Biological Medicine, 73, 1 (1950)) and the like are used. The pH of the medium is preferably about 6 to about 8. The culture is performed at generally about 30° C. to about 40° C. Where necessary, aeration and stirring may be performed.

[0663] As a medium for culturing a plant cell, for example, MS medium, LS medium, B5 medium and the like are used. The pH of the medium is preferably about 5 to about 8. The culture is performed at generally about 20° C. to about 30° C. Where necessary, aeration and stirring may be performed.

[0664] When a higher eukaryotic cell, such as animal cell, insect cell, plant cell and the like is used as a host cell, a DNA encoding a base editing system of the present disclosure (e.g., comprising an adenosine deaminase variant) is introduced into a host cell under the regulation of an inducible promoter (e.g., metallothionein promoter (induced by heavy metal ion), heat shock protein promoter (induced by heat shock), Tet-ON/Tet-OFF system promoter (induced by addition or removal of tetracycline or a derivative thereof), steroid-responsive promoter (induced by steroid hormone or a derivative thereof) etc.), the induction substance is added to the medium (or removed from the medium) at an appropriate stage to induce expression of the nucleic acid-modifying enzyme complex, culture is performed for a given period to carry out a base editing and, introduction of a mutation into a target gene, transient expression of the base editing system can be realized.

[0665] Prokaryotic cells such as Escherichia coli and the like can utilize an inducible promoter. Examples of the inducible promoter include, but are not limited to, lac promoter (induced by IPTG), cspA promoter (induced by cold shock), araBAD promoter (induced by arabinose) and the like.

[0666] Alternatively, the above-mentioned inductive promoter can also be utilized as a vector removal mechanism when higher eukaryotic cells, such as animal cell, insect cell, plant cell and the like are used as a host cell. That is, a vector is mounted with a replication origin that functions in a host cell, and a nucleic acid encoding a protein necessary for replication (e.g., SV40 on and large T antigen, oriP and EBNA-1 etc. for animal cells), of the expression of the nucleic acid encoding the protein is regulated by the above-mentioned inducible promoter. As a result, while the vector is autonomously replicatable in the presence of an induction substance, when the induction substance is removed, autonomous replication is not available, and the vector naturally falls off along with cell division (autonomous replication is not possible by the addition of tetracycline and doxycycline in Tet-OFF system vector).

### Methods of Using Base Editors

[0667] The correction of point mutations in disease-associated genes and alleles provides new strategies for gene correction with applications in therapeutics and basic research.

[0668] The present disclosure provides methods for the treatment of a subject diagnosed with a disease associated with or caused by a point mutation that can be corrected by a base editor system provided herein. For example, in some embodiments, a method is provided that comprises administering to a subject having such a disease, e.g., a disease caused by a genetic mutation, an effective amount of a nucleobase editor (e.g., an adenosine deaminase base editor) that corrects the point mutation in the disease associated gene. The present disclosure provides methods for the treatment of RTT that are associated with or caused by a point mutation that can be corrected by deaminase mediated gene editing. Suitable diseases that can be treated with the strategies and fusion proteins provided herein will be apparent to those of skill in the art based on the instant disclosure.

[0669] Provided herein are methods of using a base editor or base editor system for editing a nucleobase in a target nucleotide sequence associated with a disease or disorder. In some embodiments, the activity of the base editor (e.g., comprising an adenosine deaminase and a Cas9 domain) results in a correction of the point mutation. In some embodiments, the target DNA sequence comprises a G→A point mutation associated with a disease or disorder, and deamination of the mutant A base results in a sequence that is not associated with a disease or disorder. In some embodiments, the target DNA sequence comprises a T→C point mutation associated with a disease or disorder, and the deamination of the mutant C base results in a sequence that is not associated with a disease or disorder.

[0670] In some embodiments, the target DNA sequence encodes a protein, and the point mutation is in a codon and results in a change in the amino acid encoded by the mutant codon as compared to the wild-type codon. In some embodiments, the deamination of the mutant A results in a change of the amino acid encoded by the mutant codon. In some embodiments, the deamination of the mutant A results in the codon encoding the wild-type amino acid. In some embodiments, the deamination of the mutant C results in a change of the amino acid encoded by the mutant codon. In some embodiments, the deamination of the mutant C results in the codon encoding the wild-type amino acid. In some embodiments, the subject has or has been diagnosed with a disease or disorder.

[0671] In some embodiments, the adenosine deaminases provided herein are capable of deaminating a deoxyadenosine residue of DNA. Other aspects of the disclosure provide fusion proteins that comprise an adenosine deaminase (e.g., an adenosine deaminase that deaminates deoxyadenosine in DNA as described herein) and a domain (e.g., a Cas9 or a Cpf1 protein) capable of binding to a specific nucleotide sequence. For example, the adenosine can be converted to an inosine residue, which typically base pairs with a cytosine residue. Such fusion proteins are useful inter alia for targeted editing of nucleic acid sequences. Such fusion proteins can be used for targeted editing of DNA in vitro, e.g., for the generation of mutant cells or animals; for the introduction of targeted mutations, e.g., for the correction of genetic defects in cells ex vivo, e.g., in cells obtained from a subject that are subsequently re-introduced into the same or another subject; and for the introduction of targeted mutations in vivo, e.g., the correction of genetic defects or the introduction of deactivating mutations in disease-associated genes in a G to A, or a T to C to mutation can be treated using the nucleobase editors provided herein. The present disclosure provides deaminases, fusion proteins, nucleic acids, vectors, cells, compositions, methods, kits, systems, etc. that utilize the deaminases and nucleobase editors.

### Use of Nucleobase Editors to Target Nucleotides in the Mecp2 Gene

[0672] The suitability of nucleobase editors that target a nucleotide in the Mecp2 gene is evaluated as described herein. In one embodiment, a single cell of interest is transfected, transduced, or otherwise modified with a nucleic acid molecule or molecules encoding a nucleobase editor described herein together with a small amount of a vector encoding a reporter (e.g., GFP). These cells can be immortalized human cell lines, such as 293T, K562 or U20S. Alternatively, primary human cells may be used. Cells may also be obtained from a subject or individual, such as from tissue biopsy, surgery, blood, plasma, serum, or other biological fluid. Such cells may be relevant to the eventual cell target,

[0673] Delivery may be performed using a viral vector as further described below. In one embodiment, transfection may be performed using lipid transfection (such as Lipofectamine or Fugene) or by electroporation. Following transfection, expression of GFP can be determined either by fluorescence microscopy or by flow cytometry to confirm consistent and high levels of transfection. These preliminary transfections can comprise different nucleobase editors to determine which combinations of editors give the greatest activity.

[0674] The activity of the nucleobase editor is assessed as described herein, i.e., by sequencing the target gene to detect alterations in the target sequence. For Sanger sequencing, purified PCR amplicons are cloned into a plasmid backbone, transformed, miniprepped and sequenced with a single primer. Sequencing may also be performed using next generation sequencing techniques. When using next generation sequencing, amplicons may be 300-500 bp with the intended cut site placed asymmetrically. Following PCR, next generation sequencing adapters and barcodes (for example Illumina multiplex adapters and indexes) may be added to the ends of the amplicon, e.g., for use in high throughput sequencing (for example on an Illumina MiSeq).

[0675] The fusion proteins that induce the greatest levels of target specific alterations in initial tests can be selected for further evaluation.

[0676] In particular embodiments, the nucleobase editors are used to target polynucleotides of interest. In one embodiment, a nucleobase editor as described herein is delivered to cells (e.g., a neuron) in conjunction with a guide RNA that is used to target a nucleic acid sequence, e.g., a Mecp2 polynucleotide harboring RTT-associated mutations, thereby altering the target gene, i.e., Mecp2.

[0677] In some embodiments, a base editor is targeted by a guide RNA to introduce one or more edits to the sequence of a gene of interest. In some embodiments, the one or more alterations introduced into the Mecp2 gene are as presented in Table 10 infra.

### Generating an Intended Mutation

[0678] In some embodiments, the purpose of the methods provided herein is to restore the function of a dysfunctional gene via gene editing. In some embodiments, the function of a dysfunctional gene is restored by introducing an intended mutation. In some embodiments, the methods provided herein can be used to disrupt the normal function of a gene product. The nucleobase editing proteins provided herein can be validated for gene editing-based human therapeutics in vitro, e.g., by correcting a disease-associated mutation in human cell culture. It will be understood by the skilled artisan that the nucleobase editing proteins provided herein, e.g., the fusion proteins comprising a polynucleotide programmable nucleotide binding domain (e.g., Cas9) and a nucleobase editing domain (e.g., an adenosine deaminase domain) can be used to correct any single point A to G or C to T mutation. In the first case, deamination of the mutant A to I corrects the mutation, and in the latter case, deamination of the A that is base-paired with the mutant T, followed by a round of replication, corrects the mutation.

[0679] In some embodiments, the present disclosure provides base editors that efficiently generate an intended mutation, such as a point mutation, in a nucleic acid (e.g., a nucleic acid within a genome of a subject) without generating a significant number of unintended mutations, such as unintended point mutations. In some embodiments, an intended mutation is a mutation that is generated by a specific base editor (e.g., adenosine base editor) bound to a guide polynucleotide (e.g., gRNA), specifically designed to generate the intended mutation. In some embodiments, the intended mutation is a mutation associated with a disease or disorder, e.g., RETT syndrome. In some embodiments, the intended mutation is an adenine (A) to guanine (G) point mutation (e.g., SNP) associated with a disease or disorder, e.g., RETT syndrome. In some embodiments, the intended mutation is an adenine (A) to guanine (G) point mutation within the coding region or non-coding region of a gene (e.g., regulatory region or element). In some embodiments, the intended mutation is a point mutation that generates a stop codon, for example, a premature stop codon within the coding region of a gene. In some embodiments, the intended mutation is a mutation that eliminates a stop codon.

[0680] In some embodiments, any of the base editors provided herein are capable of generating a ratio of intended mutations to unintended mutations (e.g., intended point mutations:unintended point mutations) that is greater than 1:1. In some embodiments, any of the base editors provided herein are capable of generating a ratio of intended mutations to unintended mutations (e.g., intended point mutations:unintended point mutations) that is at least 1.5:1, at least 2:1, at least 2.5:1, at least 3:1, at least 3.5:1, at least 4:1, at least 4.5:1, at least 5:1, at least 5.5:1, at least 6:1, at least 6.5:1, at least 7:1, at least 7.5:1, at least 8:1, at least 10:1, at least 12:1, at least 15:1, at least 20:1, at least 25:1, at least 30:1, at least 40:1, at least 50:1, at least 100:1, at least 150:1, at least 200:1, at least 250:1, at least 500:1, or at least 1000:1, or more

[0681] Details of base editor efficiency are described in International PCT Application Nos. PCT/2017/045381 (WO 2018/027078) and PCT/US2016/058344 (WO 2017/070632), each of which is incorporated herein by reference for its entirety. Also see Komor, A. C., et al., “Programmable editing of a target base in genomic DNA without double-stranded DNA cleavage” Nature 533, 420-424 (2016); Gaudelli, N. M., et al., “Programmable base editing of A⋅T to G⋅C in genomic DNA without DNA cleavage” Nature 551, 464-471 (2017); and Komor, A. C., et al., “Improved base excision repair inhibition and bacteriophage Mu Gam protein yields C:G-to-T:A base editors with higher efficiency and product purity” Science Advances 3:eaao4774 (2017), the entire contents of which are hereby incorporated by reference.

[0682] In some embodiments, editing of a plurality of nucleobase pairs in one or more genes using the methods provided herein results in formation of at least one intended mutation. In some embodiments, said formation of said at least one intended mutation results in a precise correction of a disease-causing mutation. It should be appreciated that multiplex editing can be accomplished using any method or combination of methods provided herein.

### Precise Correction of Pathogenic Mutations

[0683] In some embodiments, the intended mutation is a precise correction of a pathogenic mutation or a disease-causing mutation. The pathogenic mutation can be a pathogenic single nucleotide polymorphism (SNP) or be caused by a SNP. For example, the pathogenic mutation can be an amino acid change in a protein encoded by a gene. In another example, the pathogenic mutation can be a pathogenic SNP in a gene. The precise correction can be to revert the pathogenic mutation back to its wild-type state. In some embodiments, the pathogenic mutation is a G→A point mutation associated with a disease or disorder, and wherein the deamination of the mutant A base with an A-to-G base editor (ABE) results in a sequence that is not associated with a disease or disorder. In some embodiments, the pathogenic mutation is a C→T point mutation. The C→T point mutation can be corrected, for example, by targeting an A-to-G base editor (ABE) to the opposite strand and editing the complement A of the pathogenic T nucleobase. A base editor can be targeted to a pathogenic SNP, or to the complement of the pathogenic SNP. The nomenclature of the description of pathogenic or disease-causing mutations and other sequence variations are described in den Dunnen, J. T. and Antonarakis, S. E., “Mutation Nomenclature Extensions and Suggestions to Describe Complex Mutations: A Discussion.” Human Mutation 15:712 (2000), the entire contents of which is hereby incorporated by reference.

[0684] In a particular embodiment, the disease or disorder is Rett Syndrome (RTT). In some embodiments, the pathogenic mutation is in the Mecp2 gene.

### Delivery System

[0685] Nucleic Acid-Based Delivery of a Nucleobase Editors and gRNAs

[0686] Nucleic acids encoding base editing systems according to the present disclosure can be administered to subjects or delivered into cells in vitro or in vivo by art-known methods or as described herein. In one embodiment, nucleobase editors can be delivered by, e.g., vectors (e.g., viral or non-viral vectors), non-vector based methods (e.g., using naked DNA, DNA complexes, lipid nanoparticles), or a combination thereof.

[0687] Nucleic acids encoding nucleobase editors can be delivered directly to cells (e.g., hematopoietic cells or their progenitors, hematopoietic stem cells, and/or induced pluripotent stem cells) as naked DNA or RNA, for instance by means of transfection or electroporation, or can be conjugated to molecules (e.g., N-acetylgalactosamine) promoting uptake by the target cells. Nucleic acid vectors, such as the vectors described herein can also be used.

[0688] Nucleic acid vectors can comprise one or more sequences encoding a domain of a fusion protein described herein. A vector can also comprise a sequence encoding a signal peptide (e.g., for nuclear localization, nucleolar localization, or mitochondrial localization), associated with (e.g., inserted into or fused to) a sequence coding for a protein. As one example, a nucleic acid vectors can include a Cas9 coding sequence that includes one or more nuclear localization sequences (e.g., a nuclear localization sequence from SV40), and an adenosine deaminase variant (e.g., TadA*8).

[0689] The nucleic acid vector can also include any suitable number of regulatory/control elements, e.g., promoters, enhancers, introns, polyadenylation signals, Kozak consensus sequences, or internal ribosome entry sites (IRES). These elements are well known in the art. For hematopoietic cells suitable promoters can include IFNbeta or CD45.

[0690] Nucleic acid vectors according to this disclosure include recombinant viral vectors. Exemplary viral vectors are set forth herein. Other viral vectors known in the art can also be used. In addition, viral particles can be used to deliver base editing system components in nucleic acid and/or peptide form. For example, “empty” viral particles can be assembled to contain any suitable cargo. Viral vectors and viral particles can also be engineered to incorporate targeting ligands to alter target tissue specificity.

[0691] In addition to viral vectors, non-viral vectors can be used to deliver nucleic acids encoding genome editing systems according to the present disclosure. One important category of non-viral nucleic acid vectors are nanoparticles, which can be organic or inorganic. Nanoparticles are well known in the art. Any suitable nanoparticle design can be used to deliver genome editing system components or nucleic acids encoding such components. For instance, organic (e.g. lipid and/or polymer) nanoparticles can be suitable for use as delivery vehicles in certain embodiments of this disclosure. Exemplary lipids for use in nanoparticle formulations, and/or gene transfer are shown in Table 12 (below).

TABLE 12
Lipids Used for Gene Transfer

| Lipid | Abbreviation | Feature |
|---|---|---|
| 1,2-Dioleoyl-sn-glycero-3-phosphatidylcholine | DOPC | Helper |
| 1,2-Dioleoyl-sn-glycero-3-phosphatidylethanolamine | DOPE | Helper |
| Cholesterol | | Helper |
| N-[1-(2,3-Dioleyloxy)prophyl]N,N,N-trimethylammonium chloride | DOTMA | Cationic |
| 1,2-Dioleoyloxy-3-trimethylammonium-propane | DOTAP | Cationic |
| Dioctadecylamidoglycylspermine | DOGS | Cationic |
| N-(3-Aminopropyl)-N,N-dimethyl-2,3-bis(dodecyloxy)-1-propanaminium bromide | GAP-DLRIE | Cationic |
| Cetyltrimethylammonium bromide | CTAB | Cationic |
| 6-Lauroxyhexyl ornithinate | LHON | Cationic |
| 1-(2,3-Dioleoyloxypropyl)-2,4,6-trimethylpyridinium | 2Oc | Cationic |
| 2,3-Dioleyloxy-N-[2(sperminecarboxamido-ethyl]-N,N- | DOSPA | Cationic |
| dimethyl-1-propanaminium trifluoroacetate | | |
| 1,2-Dioleyl-3-trimethylammonium-propane | DOPA | Cationic |
| N-(2-Hydroxyethyl)-N,N-dimethyl-2,3-bis(tetradecyloxy)-1-propanaminium bromide | MDRIE | Cationic |
| Dimyristooxypropyl dimethyl hydroxyethyl ammonium bromide | DMRI | Cationic |
| 3β-[N-(N′,N′-Dimethylaminoethane)-carbamoyl]cholesterol | DC-Chol | Cationic |
| Bis-guanidium-tren-cholesterol | BGTC | Cationic |
| 1,3-Diodeoxy-2-(6-carboxy-spermyl)-propylamide | DOSPER | Cationic |
| Dimethyloctadecylammonium bromide | DDAB | Cationic |
| Dioctadecylamidoglicylspermidin | DSL | Cationic |
| rac-[(2,3-Dioctadecyloxypropyl)(2-hydroxyethyl)]-dimethylammonium chloride | CLIP-1 | Cationic |
| rac-[2(2,3-Dihexadecyloxypropyl-oxymethyloxy)ethyl]trimethylammoniun | CLIP-6 | Cationic |
| bromide | | |
| Ethyldimyristoylphosphatidylcholine | EDMPC | Cationic |
| 1,2-Distearyloxy-N,N-dimethyl-3-aminopropane | DSDMA | Cationic |
| 1,2-Dimyristoyl-trimethylammonium propane | DMTAP | Cationic |
| O,O′-Dimyristyl-N-lysyl aspartate | DMKE | Cationic |
| 1,2-Distearoyl-sn-glycero-3-ethylpho sphocholine | DSEPC | Cationic |
| N-Palmitoyl D-erythro-sphingosyl carbamoyl-spermine | CCS | Cationic |
| N-t-Butyl-N0-tetradecyl-3-tetradecylaminopropionamidine | diC14-amidine | Cationic |
| Octadecenolyoxy[ethyl-2-heptadecenyl-3 hydroxyethyl] | DOTIM | Cationic |
| imidazolinium chloride | | |
| N1 -Cholesteryloxycarbonyl-3,7-diazanonane-1,9-diamine | CDAN | Cationic |
| 2-(3-[Bis(3-amino-propyl)-amino]propylamino)-N- | RPR209120 | Cationic |
| ditetradecylcarbamoylme-ethyl-acetamide | | |
| 1,2-dilinoleyloxy-3-dimethylaminopropane | DLinDMA | Cationic |
| 2,2-dilinoleyl-4-dimethylaminoethyl-[1,3]-dioxolane | DLin-KC2-DMA | Cationic |
| dilinoleyl-methyl-4-dimethylaminobutyrate | DLin-MC3-DMA | Cationic |

[0692] Table 13 lists exemplary polymers for use in gene transfer and/or nanoparticle formulations.

TABLE 13
Polymers Used for Gene Transfer

| Polymer | Abbreviation |
|---|---|
| Poly(ethylene)glycol | PEG |
| Polyethylenimine | PEI |
| Dithiobis (succinimidylpropionate) | DSP |
| Dimethyl-3,3′-dithiobispropionimidate | DTBP |
| Poly(ethylene imine)biscarbamate | PEIC |
| Poly(L-lysine) | PLL |
| Histidine modified PLL | |
| Poly(N-vinylpyrrolidone) | PVP |
| Poly(propylenimine) | PPI |
| Poly(amidoamine) | PAMAM |
| Poly(amidoethylenimine) | SS-PAEI |
| Triethylenetetramine | TETA |
| Poly(β-aminoester) | |
| Poly(4-hydroxy-L-proline ester) | PHP |
| Poly(allylamine) | |
| Poly(α-[4-aminobutyl]-L-glycolic acid) | PAGA |
| Poly(D,L-lactic-co-glycolic acid) | PLGA |
| Poly(N-ethyl-4-vinylpyridinium bromide) | |
| Poly(phosphazene)s | PPZ |
| Poly(phosphoester)s | PPE |
| Poly(phosphoramidate)s | PPA |
| Poly(N-2-hydroxypropylmethacrylamide) | pHPMA |
| Poly (2-(dimethylamino)ethyl methacrylate) | pDMAEMA |
| Poly(2-aminoethyl propylene phosphate) | PPE-EA |
| Chitosan | |
| Galactosylated chitosan | |
| N-Dodacylated chitosan | |
| Histone | |
| Collagen | |
| Dextran-spermine | D-SPM |

[0693] Table 14 summarizes delivery methods for a polynucleotide encoding a fusion protein described herein.

TABLE 14

| | | Delivery into | | | Type of |
|---|---|---|---|---|---|
| | | Non-Dividing | Duration of | Genome | Molecule |
| Delivery | Vector/Mode | Cells | Expression | Integration | Delivered |
| Physical | (e.g., | YES | Transient | NO | Nucleic Acids |
| | electroporation, | | | | and Proteins |
| | particle gun, | | | | |
| | Calcium | | | | |
| | Phosphate | | | | |
| | transfection | | | | |
| Viral | Retrovirus | NO | Stable | YES | RNA |
| | Lentivirus | YES | Stable | YES/NO with | RNA |
| | | | | modification | |
| | Adenovirus | YES | Transient | NO | DNA |
| | Adeno-Associated | YES | Stable | NO | DNA |
| | Virus (AAV) | | | | |
| | Vaccinia Virus | YES | Very Transient | NO | DNA |
| | Herpes Simplex | YES | Stable | NO | DNA |
| | Virus | | | | |
| Non-Viral | Cationic | YES | Transient | Depends on | Nucleic Acids |
| | Liposomes | | | what is delivered | and Proteins |
| | Polymeric | YES | Transient | Depends on | Nucleic Acids |
| | Nanoparticles | | | what is delivered | and Proteins |
| Biological | Attenuated | YES | Transient | NO | Nucleic Acids |
| Non-Viral | Bacteria | | | | |
| Delivery | Engineered | YES | Transient | NO | Nucleic Acids |
| Vehicles | Bacteriophages | | | | |
| | Mammalian | YES | Transient | NO | Nucleic Acids |
| | Virus-like | | | | |
| | Particles | | | | |
| | Biological | YES | Transient | NO | Nucleic Acids |
| | liposomes: | | | | |
| | Erythrocyte | | | | |
| | Ghosts and | | | | |
| | Exosomes | | | | |

[0694] In another aspect, the delivery of genome editing system components or nucleic acids encoding such components, for example, a nucleic acid binding protein such as, for example, Cas9 or variants thereof, and a gRNA targeting a genomic nucleic acid sequence of interest, may be accomplished by delivering a ribonucleoprotein (RNP) to cells. The RNP comprises the nucleic acid binding protein, e.g., Cas9, in complex with the targeting gRNA. RNPs may be delivered to cells using known methods, such as electroporation, nucleofection, or cationic lipid-mediated methods, for example, as reported by Zuris, J. A. et al., 2015, Nat. Biotechnology, 33(1):73-80. RNPs are advantageous for use in CRISPR base editing systems, particularly for cells that are difficult to transfect, such as primary cells. In addition, RNPs can also alleviate difficulties that may occur with protein expression in cells, especially when eukaryotic promoters, e.g., CMV or EF1A, which may be used in CRISPR plasmids, are not well-expressed. Advantageously, the use of RNPs does not require the delivery of foreign DNA into cells. Moreover, because an RNP comprising a nucleic acid binding protein and gRNA complex is degraded over time, the use of RNPs has the potential to limit off-target effects. In a manner similar to that for plasmid based techniques, RNPs can be used to deliver binding protein (e.g., Cas9 variants) and to direct homology directed repair (HDR).

[0695] A promoter used to drive base editor coding nucleic acid molecule expression can include AAV ITR. This can be advantageous for eliminating the need for an additional promoter element, which can take up space in the vector. The additional space freed up can be used to drive the expression of additional elements, such as a guide nucleic acid or a selectable marker. ITR activity is relatively weak, so it can be used to reduce potential toxicity due to over expression of the chosen nuclease.

[0696] Any suitable promoter can be used to drive expression of the base editor and, where appropriate, the guide nucleic acid. For ubiquitous expression, promoters that can be used include CMV, CAG, CBh, PGK, SV40, Ferritin heavy or light chains, etc. For brain or other CNS cell expression, suitable promoters can include: SynapsinI for all neurons, CaMKIIalpha for excitatory neurons, GAD67 or GAD65 or VGAT for GABAergic neurons, etc. For liver cell expression, suitable promoters include the Albumin promoter. For lung cell expression, suitable promoters can include SP-B. For endothelial cells, suitable promoters can include ICAM. For hematopoietic cells suitable promoters can include IFNbeta or CD45. For Osteoblasts suitable promoters can include OG-2.

[0697] In some embodiments, a base editor of the present disclosure is of small enough size to allow separate promoters to drive expression of the base editor and a compatible guide nucleic acid within the same nucleic acid molecule. For instance, a vector or viral vector can comprise a first promoter operably linked to a nucleic acid encoding the base editor and a second promoter operably linked to the guide nucleic acid.

[0698] The promoter used to drive expression of a guide nucleic acid can include: Pol III promoters such as U6 or H1 Use of Pol II promoter and intronic cassettes to express gRNA Adeno Associated Virus (AAV).

### Viral Vectors

[0699] A base editor described herein can therefore be delivered with viral vectors. In some embodiments, a base editor disclosed herein can be encoded on a nucleic acid that is contained in a viral vector. In some embodiments, one or more components of the base editor system can be encoded on one or more viral vectors. For example, a base editor and guide nucleic acid can be encoded on a single viral vector. In other embodiments, the base editor and guide nucleic acid are encoded on different viral vectors. In either case, the base editor and guide nucleic acid can each be operably linked to a promoter and terminator. The combination of components encoded on a viral vector can be determined by the cargo size constraints of the chosen viral vector.

[0700] The use of RNA or DNA viral based systems for the delivery of a base editor takes advantage of highly evolved processes for targeting a virus to specific cells in culture or in the host and trafficking the viral payload to the nucleus or host cell genome. Viral vectors can be administered directly to cells in culture, patients (in vivo), or they can be used to treat cells in vitro, and the modified cells can optionally be administered to patients (ex vivo). Conventional viral based systems could include retroviral, lentivirus, adenoviral, adeno-associated and herpes simplex virus vectors for gene transfer. Integration in the host genome is possible with the retrovirus, lentivirus, and adeno-associated virus gene transfer methods, often resulting in long term expression of the inserted transgene. Additionally, high transduction efficiencies have been observed in many different cell types and target tissues.

[0701] Viral vectors can include lentivirus (e.g., HIV and FIV-based vectors), Adenovirus (e.g., AD100), Retrovirus (e.g., Maloney murine leukemia virus, MML-V), herpesvirus vectors (e.g., HSV-2), and Adeno-associated viruses (AAVs), or other plasmid or viral vector types, in particular, using formulations and doses from, for example, U.S. Pat. No. 8,454,972 (formulations, doses for adenovirus), U.S. Pat. No. 8,404,658 (formulations, doses for AAV) and U.S. Pat. No. 5,846,946 (formulations, doses for DNA plasmids) and from clinical trials and publications regarding the clinical trials involving lentivirus, AAV and adenovirus. For example, for AAV, the route of administration, formulation and dose can be as in U.S. Pat. No. 8,454,972 and as in clinical trials involving AAV. For Adenovirus, the route of administration, formulation and dose can be as in U.S. Pat. No. 8,404,658 and as in clinical trials involving adenovirus. For plasmid delivery, the route of administration, formulation and dose can be as in U.S. Pat. No. 5,846,946 and as in clinical studies involving plasmids. Doses can be based on or extrapolated to an average 70 kg individual (e.g. a male adult human), and can be adjusted for patients, subjects, mammals of different weight and species. Frequency of administration is within the ambit of the medical or veterinary practitioner (e.g., physician, veterinarian), depending on usual factors including the age, sex, general health, other conditions of the patient or subject and the particular condition or symptoms being addressed. The viral vectors can be injected into the tissue of interest. For cell-type specific base editing, the expression of the base editor and optional guide nucleic acid can be driven by a cell-type specific promoter.

[0702] The tropism of a retrovirus can be altered by incorporating foreign envelope proteins, expanding the potential target population of target cells. Lentiviral vectors are retroviral vectors that are able to transduce or infect non-dividing cells and typically produce high viral titers. Selection of a retroviral gene transfer system would therefore depend on the target tissue. Retroviral vectors are comprised of cis-acting long terminal repeats with packaging capacity for up to 6-10 kb of foreign sequence. The minimum cis-acting LTRs are sufficient for replication and packaging of the vectors, which are then used to integrate the therapeutic gene into the target cell to provide permanent transgene expression. Widely used retroviral vectors include those based upon murine leukemia virus (MuLV), gibbon ape leukemia virus (GaLV), Simian Immuno deficiency virus (SIV), human immuno deficiency virus (HIV), and combinations thereof (See, e.g., Buchscher et al., J. Virol. 66:2731-2739 (1992); Johann et al., J. Virol. 66:1635-1640 (1992); Sommnerfelt et al., Virol. 176:58-59 (1990); Wilson et al., J. Virol. 63:2374-2378 (1989); Miller et al., J. Virol. 65:2220-2224 (1991); PCT/US94/05700).

[0703] Retroviral vectors, especially lentiviral vectors, can require polynucleotide sequences smaller than a given length for efficient integration into a target cell. For example, retroviral vectors of length greater than 9 kb can result in low viral titers compared with those of smaller size. In some aspects, a base editor of the present disclosure is of sufficient size so as to enable efficient packaging and delivery into a target cell via a retroviral vector. In some embodiments, a base editor is of a size so as to allow efficient packing and delivery even when expressed together with a guide nucleic acid and/or other components of a targetable nuclease system.

[0704] In applications where transient expression is preferred, adenoviral based systems can be used. Adenoviral based vectors are capable of very high transduction efficiency in many cell types and do not require cell division. With such vectors, high titer and levels of expression have been obtained. This vector can be produced in large quantities in a relatively simple system. Adeno-associated virus (“AAV”) vectors can also be used to transduce cells with target nucleic acids, e.g., in the in vitro production of nucleic acids and peptides, and for in vivo and ex vivo gene therapy procedures (See, e.g., West et al., Virology 160:38-47 (1987); U.S. Pat. No. 4,797,368; WO 93/24641; Kotin, Human Gene Therapy 5:793-801 (1994); Muzyczka, J. Clin. Invest. 94:1351 (1994). The construction of recombinant AAV vectors is described in a number of publications, including U.S. Pat. No. 5,173,414; Tratschin et al., Mol. Cell. Biol. 5:3251-3260 (1985); Tratschin, et al., Mol. Cell. Biol. 4:2072-2081 (1984); Hermonat & Muzyczka, PNAS 81:6466-6470 (1984); and Samulski et al., J. Virol. 63:03822-3828 (1989).

[0705] AAV is a small, single-stranded DNA dependent virus belonging to the parvovirus family. The 4.7 kb wild-type (wt) AAV genome is made up of two genes that encode four replication proteins and three capsid proteins, respectively, and is flanked on either side by 145-bp inverted terminal repeats (ITRs). The virion is composed of three capsid proteins, Vp1, Vp2, and Vp3, produced in a 1:1:10 ratio from the same open reading frame but from differential splicing (Vp1) and alternative translational start sites (Vp2 and Vp3, respectively). Vp3 is the most abundant subunit in the virion and participates in receptor recognition at the cell surface defining the tropism of the virus. A phospholipase domain, which functions in viral infectivity, has been identified in the unique N terminus of Vp1.

[0706] Similar to wt AAV, recombinant AAV (rAAV) utilizes the cis-acting 145-bp ITRs to flank vector transgene cassettes, providing up to 4.5 kb for packaging of foreign DNA. Subsequent to infection, rAAV can express a fusion protein of the disclosure and persist without integration into the host genome by existing episomally in circular head-to-tail concatemers. Although there are numerous examples of rAAV success using this system, in vitro and in vivo, the limited packaging capacity has limited the use of AAV-mediated gene delivery when the length of the coding sequence of the gene is equal or greater in size than the wt AAV genome.

[0707] Viral vectors can be selected based on the application. For example, for in vivo gene delivery, AAV can be advantageous over other viral vectors. In some embodiments, AAV allows low toxicity, which can be due to the purification method not requiring ultra-centrifugation of cell particles that can activate the immune response. In some embodiments, AAV allows low probability of causing insertional mutagenesis because it doesn't integrate into the host genome. Adenoviruses are commonly used as vaccines because of the strong immunogenic response they induce. Packaging capacity of the viral vectors can limit the size of the base editor that can be packaged into the vector.

[0708] AAV has a packaging capacity of about 4.5 Kb or 4.75 Kb including two 145 base inverted terminal repeats (ITRs). This means disclosed base editor as well as a promoter and transcription terminator can fit into a single viral vector. Constructs larger than 4.5 or 4.75 Kb can lead to significantly reduced virus production. For example, SpCas9 is quite large, the gene itself is over 4.1 Kb, which makes it difficult for packing into AAV. Therefore, embodiments of the present disclosure include utilizing a disclosed base editor which is shorter in length than conventional base editors. In some examples, the base editors are less than 4 kb. Disclosed base editors can be less than 4.5 kb, 4.4 kb, 4.3 kb, 4.2 kb, 4.1 kb, 4 kb, 3.9 kb, 3.8 kb, 3.7 kb, 3.6 kb, 3.5 kb, 3.4 kb, 3.3 kb, 3.2 kb, 3.1 kb, 3 kb, 2.9 kb, 2.8 kb, 2.7 kb, 2.6 kb, 2.5 kb, 2 kb, or 1.5 kb. In some embodiments, the disclosed base editors are 4.5 kb or less in length.

[0709] An AAV can be AAV1, AAV2, AAV5 or any combination thereof. One can select the type of AAV with regard to the cells to be targeted; e.g., one can select AAV serotypes 1, 2, 5 or a hybrid capsid AAV1, AAV2, AAV5 or any combination thereof for targeting brain or neuronal cells; and one can select AAV4 for targeting cardiac tissue. AAV8 is useful for delivery to the liver. A tabulation of certain AAV serotypes as to these cells can be found in Grimm, D. et al, J. Virol. 82: 5887-5911 (2008)).

[0710] Lentiviruses are complex retroviruses that have the ability to infect and express their genes in both mitotic and post-mitotic cells. The most commonly known lentivirus is the human immunodeficiency virus (HIV), which uses the envelope glycoproteins of other viruses to target a broad range of cell types.

[0711] Lentiviruses can be prepared as follows. After cloning pCasES10 (which contains a lentiviral transfer plasmid backbone), HEK293FT at low passage (p=5) were seeded in a T-75 flask to 50% confluence the day before transfection in DMEM with 10% fetal bovine serum and without antibiotics. After 20 hours, media is changed to OptiMEM (serum-free) media and transfection was done 4 hours later. Cells are transfected with 10 μg of lentiviral transfer plasmid (pCasES10) and the following packaging plasmids: 5 μg of pMD2.G (VSV-g pseudotype), and 7.5 μg of psPAX2 (gag/pol/rev/tat). Transfection can be done in 4 mL OptiMEM with a cationic lipid delivery agent (50 μl Lipofectamine 2000 and 100 μl Plus reagent). After 6 hours, the media is changed to antibiotic-free DMEM with 10% fetal bovine serum. These methods use serum during cell culture, but serum-free methods are preferred.

[0712] Lentivirus can be purified as follows. Viral supernatants are harvested after 48 hours. Supernatants are first cleared of debris and filtered through a 0.45 μm low protein binding (PVDF) filter. They are then spun in an ultracentrifuge for 2 hours at 24,000 rpm. Viral pellets are resuspended in 50 μl of DMEM overnight at 4° C. They are then aliquoted and immediately frozen at −80° C.

[0713] In another embodiment, minimal non-primate lentiviral vectors based on the equine infectious anemia virus (EIAV) are also contemplated. In another embodiment, RetinoStat.RTM., an equine infectious anemia virus-based lentiviral gene therapy vector that expresses angiostatic proteins endostatin and angiostatin that is contemplated to be delivered via a subretinal injection. In another embodiment, use of self-inactivating lentiviral vectors are contemplated.

[0714] Any RNA of the systems, for example a guide RNA or a base editor-encoding mRNA, can be delivered in the form of RNA. Base editor-encoding mRNA can be generated using in vitro transcription. For example, nuclease mRNA can be synthesized using a PCR cassette containing the following elements: T7 promoter, optional kozak sequence (GCCACC), nuclease sequence, and 3′ UTR such as a 3′ UTR from beta globin-polyA tail. The cassette can be used for transcription by T7 polymerase. Guide polynucleotides (e.g., gRNA) can also be transcribed using in vitro transcription from a cassette containing a T7 promoter, followed by the sequence “GG”, and guide polynucleotide sequence.

[0715] To enhance expression and reduce possible toxicity, the base editor-coding sequence and/or the guide nucleic acid can be modified to include one or more modified nucleoside e.g. using pseudo-U or 5-Methyl-C.

[0716] The small packaging capacity of AAV vectors makes the delivery of a number of genes that exceed this size and/or the use of large physiological regulatory elements challenging. These challenges can be addressed, for example, by dividing the protein(s) to be delivered into two or more fragments, wherein the N-terminal fragment is fused to a split intein-N and the C-terminal fragment is fused to a split intein-C. These fragments are then packaged into two or more AAV vectors. As used herein, “intein” refers to a self-splicing protein intron (e.g., peptide) that ligates flanking N-terminal and C-terminal exteins (e.g., fragments to be joined). The use of certain inteins for joining heterologous protein fragments is described, for example, in Wood et al., J. Biol. Chem. 289(21); 14512-9 (2014). For example, when fused to separate protein fragments, the inteins IntN and IntC recognize each other, splice themselves out and simultaneously ligate the flanking N- and C-terminal exteins of the protein fragments to which they were fused, thereby reconstituting a full-length protein from the two protein fragments. Other suitable inteins will be apparent to a person of skill in the art.

[0717] A fragment of a fusion protein of the disclosure can vary in length. In some embodiments, a protein fragment ranges from 2 amino acids to about 1000 amino acids in length. In some embodiments, a protein fragment ranges from about 5 amino acids to about 500 amino acids in length. In some embodiments, a protein fragment ranges from about 20 amino acids to about 200 amino acids in length. In some embodiments, a protein fragment ranges from about 10 amino acids to about 100 amino acids in length. Suitable protein fragments of other lengths will be apparent to a person of skill in the art.

[0718] In one embodiment, dual AAV vectors are generated by splitting a large transgene expression cassette in two separate halves (5′ and 3′ ends, or head and tail), where each half of the cassette is packaged in a single AAV vector (of <5 kb). The re-assembly of the full-length transgene expression cassette is then achieved upon co-infection of the same cell by both dual AAV vectors followed by: (1) homologous recombination (HR) between 5′ and 3′ genomes (dual AAV overlapping vectors); (2) ITR-mediated tail-to-head concatemerization of 5′ and 3′ genomes (dual AAV trans-splicing vectors); or (3) a combination of these two mechanisms (dual AAV hybrid vectors). The use of dual AAV vectors in vivo results in the expression of full-length proteins. The use of the dual AAV vector platform represents an efficient and viable gene transfer strategy for transgenes of >4.7 kb in size.

### Inteins

[0719] In some embodiments, a portion or fragment of a nuclease (e.g., Cas9) is fused to an intein. The nuclease can be fused to the N-terminus or the C-terminus of the intein. In some embodiments, a portion or fragment of a fusion protein is fused to an intein and fused to an AAV capsid protein. The intein, nuclease and capsid protein can be fused together in any arrangement (e.g., nuclease-intein-capsid, intein-nuclease-capsid, capsid-intein-nuclease, etc.). In some embodiments, the N-terminus of an intein is fused to the C-terminus of a fusion protein and the C-terminus of the intein is fused to the N-terminus of an AAV capsid protein.

[0720] Inteins (intervening protein) are auto-processing domains found in a variety of diverse organisms, which carry out a process known as protein splicing. Protein splicing is a multi-step biochemical reaction comprised of both the cleavage and formation of peptide bonds. While the endogenous substrates of protein splicing are proteins found in intein-containing organisms, inteins can also be used to chemically manipulate virtually any polypeptide backbone.

[0721] In protein splicing, the intein excises itself out of a precursor polypeptide by cleaving two peptide bonds, thereby ligating the flanking extein (external protein) sequences via the formation of a new peptide bond. This rearrangement occurs post-translationally (or possibly co-translationally). Intein-mediated protein splicing occurs spontaneously, requiring only the folding of the intein domain.

[0722] About 5% of inteins are split inteins, which are transcribed and translated as two separate polypeptides, the N-intein and C-intein, each fused to one extein. Upon translation, the intein fragments spontaneously and non-covalently assemble into the canonical intein structure to carry out protein splicing in trans. The mechanism of protein splicing entails a series of acyl-transfer reactions that result in the cleavage of two peptide bonds at the intein-extein junctions and the formation of a new peptide bond between the N- and C-exteins. This process is initiated by activation of the peptide bond joining the N-extein and the N-terminus of the intein. Virtually all inteins have a cysteine or serine at their N-terminus that attacks the carbonyl carbon of the C-terminal N-extein residue. This N to O/S acyl-shift is facilitated by a conserved threonine and histidine (referred to as the TXXH motif), along with a commonly found aspartate, which results in the formation of a linear (thio)ester intermediate. Next, this intermediate is subject to trans-(thio)esterification by nucleophilic attack of the first C-extein residue (+1), which is a cysteine, serine, or threonine. The resulting branched (thio)ester intermediate is resolved through a unique transformation: cyclization of the highly conserved C-terminal asparagine of the intein. This process is facilitated by the histidine (found in a highly conserved HNF motif) and the penultimate histidine and may also involve the aspartate. This succinimide formation reaction excises the intein from the reactive complex and leaves behind the exteins attached through a non-peptidic linkage. This structure rapidly rearranges into a stable peptide bond in an intein-independent fashion.

[0723] In some embodiments, an N-terminal fragment of a base editor (e.g., ABE, CBE) is fused to a split intein-N and a C-terminal fragment is fused to a split intein-C. These fragments are then packaged into two or more AAV vectors. The use of certain inteins for joining heterologous protein fragments is described, for example, in Wood et al., J. Biol. Chem. 289(21); 14512-9 (2014). For example, when fused to separate protein fragments, the inteins IntN and IntC recognize each other, splice themselves out and simultaneously ligate the flanking N- and C-terminal exteins of the protein fragments to which they were fused, thereby reconstituting a full-length protein from the two protein fragments. Other suitable inteins will be apparent to a person of skill in the art.

[0724] In some embodiments, an ABE was split into N- and C-terminal fragments at Ala, Ser, Thr, or Cys residues within selected regions of SpCas9. These regions correspond to loop regions identified by Cas9 crystal structure analysis. The N-terminus of each fragment is fused to an intein-N and the C-terminus of each fragment is fused to an intein C at amino acid positions S303, T310, T313, S355, A456, S460, A463, T466, S469, T472, T474, C574, S577, A589, and S590, which are indicated in bold capital letters in the sequence below.

| | |
|---|---|
| 1 | mdkkysigld igtnsvgwav itdeykvpsk kfkvlgntdr |
| | hsikknliga llfdsgetae |

| | |
|---|---|
| 61 | atrlkrtarr rytrrknric ylqeifsnem akvddsffhr |
| | leesflveed kkherhpifg |
| 121 | nivdevayhe kyptiyhlrk klvdstdkad lrliylalah |
| | mikfrghfli egdlnpdnsd |
| 181 | vdklfiqlvq tynqlfeenp inasgvdaka ilsarlsksr |
| | rlenliaqlp gekknglfgn |
| 241 | lialslgltp nfksnfdlae daklqlskdt ydddldnlla |
| | qigdqyadlf laaknlsdai |
| 301 | llSdilrvnT eiTkaplsas mikrydehhq dltllkalvr |
| | qqlpekykei ffdqSkngya |
| 361 | gyidggasqe efykfikpil ekmdgteell vklnredllr |
| | kqrtfdngsi phqihlgelh |
| 421 | ailrrqedfy pfikdnreki ekiltfripy yvgplArgnS |
| | rfAwmTrkSe eTiTpwnfee |
| 481 | vvdkgasaqs fiermtnfdk nlpnekvlpk hsllyeyftv |
| | yneltkvkyv tegmrkpafl |
| 541 | sgeqkkaivd llfktnrkvt vkqlkedyfk kieCfdSvei |
| | sgvedrfnAS lgtyhdllki |
| 601 | ikdkdfldne enedilediv ltltlfedre mieerlktya |
| | hlfddkvmkq lkrrrytgwg |
| 661 | rlsrklingi rdkqsgktil dflksdgfan rnfmqlihdd |
| | sltfkediqk aqvsgqgdsl |
| 721 | hehianlags paikkgilqt vkvvdelvkv mgrhkpeniv |
| | iemarenqtt qkgqknsrer |
| 781 | mkrieegike igsqilkehp ventqlqnek lylyylqngr |
| | dmyvdqeldi nrlsdydvdh |
| 841 | ivpqsflkdd sidnkvltrs dknrgksdnv pseevvkkmk |
| | nywrqllnak litqrkfdnl |
| 901 | tkaergglse ldkagfikrq lvetrqitkh vaqildsrmn |
| | tkydendkli revkvitlks |
| 961 | klvsdfrkdf qfykvreinn yhhahdayln avvgtalikk |
| | ypklesefvy gdykvydvrk |
| 1021 | miakseqeig katakyffys nimnffktei tlangeirkr |
| | plietngetg eivwdkgrdf |
| 1081 | atvrkvlsmp qvnivkktev qtggfskesi lpkrnsdkli |
| | arkkdwdpkk yggfdsptva |
| 1141 | ysvlvvakve kgkskklksv kellgitime rssfeknpid |
| | fleakgykev kkdliiklpk |
| 1201 | yslfelengr krmlasagel qkgnelalps kyvnflylas |
| | hyeklkgspe dneqkqlfve |
| 1261 | qhkhyldeii eqisefskrv iladanldkv lsaynkhrdk |
| | pireqaenii hlftltnlga |
| 1321 | paafkyfdtt idrkrytstk evldatlihq sitglyetri |
| | dlsqlggd |

### Pharmaceutical Compositions

[0725] Other aspects of the present disclosure relate to pharmaceutical compositions comprising any of the base editors, fusion proteins, or the fusion protein-guide polynucleotide complexes described herein. In some embodiments, the pharmaceutical composition further comprises a pharmaceutically acceptable carrier. In some embodiments, the pharmaceutical composition comprises additional agents (e.g., for specific delivery, increasing half-life, or other therapeutic compounds).

[0726] Some non-limiting examples of materials that can serve as pharmaceutically-acceptable carriers include: (1) sugars, such as lactose, glucose and sucrose; (2) starches, such as corn starch and potato starch; (3) cellulose, and its derivatives, such as sodium carboxymethyl cellulose, methylcellulose, ethyl cellulose, microcrystalline cellulose and cellulose acetate; (4) powdered tragacanth; (5) malt; (6) gelatin; (7) lubricating agents, such as magnesium stearate, sodium lauryl sulfate and talc; (8) excipients, such as cocoa butter and suppository waxes; (9) oils, such as peanut oil, cottonseed oil, safflower oil, sesame oil, olive oil, corn oil and soybean oil; (10) glycols, such as propylene glycol; (11) polyols, such as glycerin, sorbitol, mannitol and polyethylene glycol (PEG); (12) esters, such as ethyl oleate and ethyl laurate; (13) agar; (14) buffering agents, such as magnesium hydroxide and aluminum hydroxide; (15) alginic acid; (16) pyrogen-free water; (17) isotonic saline; (18) Ringer's solution; (19) ethyl alcohol; (20) pH buffered solutions; (21) polyesters, polycarbonates and/or polyanhydrides; (22) bulking agents, such as polypeptides and amino acids (23) serum alcohols, such as ethanol; and (23) other non-toxic compatible substances employed in pharmaceutical formulations. Buffering agents, wetting agents, emulsifying agents, diluents, encapsulating agents, skin penetration enhancers, coloring agents, release agents, coating agents, sweetening agents, flavoring agents, perfuming agents, preservative and antioxidants can also be present in the formulation. For example, carriers can include, but are not limited to, saline, buffered saline, dextrose, arginine, sucrose, water, glycerol, ethanol, sorbitol, dextran, sodium carboxymethyl cellulose, and combinations thereof.

[0727] Pharmaceutical compositions can comprise one or more pH buffering compounds to maintain the pH of the formulation at a predetermined level that reflects physiological pH, such as in the range of about 5.0 to about 8.0. The pH buffering compound used in the aqueous liquid formulation can be an amino acid or mixture of amino acids, such as histidine or a mixture of amino acids such as histidine and glycine. Alternatively, the pH buffering compound is, in some embodiments, an agent that maintains the pH of the formulation at a predetermined level, such as in the range of about 5.0 to about 8.0, and that does not chelate calcium ions. Illustrative examples of such pH buffering compounds include, but are not limited to, imidazole and acetate ions. The pH buffering compound may be present in any amount suitable to maintain the pH of the formulation at a predetermined level.

[0728] Pharmaceutical compositions can also contain one or more osmotic modulating agents, i.e., a compound that modulates the osmotic properties (e.g., tonicity, osmolality, and/or osmotic pressure) of the formulation to a level that is acceptable to the blood stream and blood cells of recipient individuals. The osmotic modulating agent can be an agent that does not chelate calcium ions. The osmotic modulating agent can be any compound known or available to those skilled in the art that modulates the osmotic properties of the formulation. One skilled in the art may empirically determine the suitability of a given osmotic modulating agent for use in the inventive formulation. Illustrative examples of suitable types of osmotic modulating agents include, but are not limited to: salts, such as sodium chloride and sodium acetate; sugars, such as sucrose, dextrose, and mannitol; amino acids, such as glycine; and mixtures of one or more of these agents and/or types of agents. The osmotic modulating agent(s) may be present in any concentration sufficient to modulate the osmotic properties of the formulation.

[0729] In some embodiments, the pharmaceutical composition is formulated for delivery to a subject, e.g., for gene editing. In some embodiments, administration of the pharmaceutical compositions contemplated herein may be carried out using conventional techniques including, but not limited to, infusion, transfusion, or parenterally. In some embodiments, parenteral administration includes infusing or injecting intravascularly, intravenously, intramuscularly, intraarterially, intrathecally, intratumorally, intradermally, intraperitoneally, transtracheally, subcutaneously, subcuticularly, intraarticularly, subcapsularly, subarachnoidly and intrasternally. In some embodiments, suitable routes of administrating the pharmaceutical composition described herein include, without limitation: topical, subcutaneous, transdermal, intradermal, intralesional, intraarticular, intraperitoneal, intravesical, transmucosal, gingival, intradental, intracochlear, transtympanic, intraorgan, epidural, intrathecal, intramuscular, intravenous, intravascular, intraosseus, periocular, intratumoral, intracerebral, and intracerebroventricular administration.

[0730] In some embodiments, the pharmaceutical composition described herein is administered locally to a diseased site (e.g., tumor site). In some embodiments, the pharmaceutical composition described herein is administered to a subject by injection, by means of a catheter, by means of a suppository, or by means of an implant, the implant being of a porous, non-porous, or gelatinous material, including a membrane, such as a sialastic membrane, or a fiber.

[0731] In other embodiments, the pharmaceutical composition described herein is delivered in a controlled release system. In one embodiment, a pump can be used (see, e.g., Langer, 1990, Science 249: 1527-1533; Sefton, 1989, CRC Crit. Ref. Biomed. Eng. 14:201; Buchwald et al., 1980, Surgery 88:507; Saudek et al, 1989, N. Engl. J. Med. 321:574). In another embodiment, polymeric materials can be used. (See, e.g., Medical Applications of Controlled Release (Langer and Wise eds., CRC Press, Boca Raton, Fla., 1974); Controlled Drug Bioavailability, Drug Product Design and Performance (Smolen and Ball eds., Wiley, New York, 1984); Ranger and Peppas, 1983, Macromol. Sci. Rev. Macromol. Chem. 23:61. See also Levy et al., 1985, Science 228: 190; During et al., 1989, Ann. Neurol. 25:351; Howard et al., 1989, J. Neurosurg. 71: 105). Other controlled release systems are discussed, for example, in Langer, supra.

[0732] In some embodiments, the pharmaceutical composition is formulated in accordance with routine procedures as a composition adapted for intravenous or subcutaneous administration to a subject, e.g., a human. In some embodiments, pharmaceutical composition for administration by injection are solutions in sterile isotonic use as solubilizing agent and a local anesthetic such as lignocaine to ease pain at the site of the injection. Generally, the ingredients are supplied either separately or mixed together in unit dosage form, for example, as a dry lyophilized powder or water free concentrate in a hermetically sealed container such as an ampoule or sachette indicating the quantity of active agent. Where the pharmaceutical is to be administered by infusion, it can be dispensed with an infusion bottle containing sterile pharmaceutical grade water or saline. Where the pharmaceutical composition is administered by injection, an ampoule of sterile water for injection or saline can be provided so that the ingredients can be mixed prior to administration.

[0733] A pharmaceutical composition for systemic administration can be a liquid, e.g., sterile saline, lactated Ringer's or Hank's solution. In addition, the pharmaceutical composition can be in solid forms and re-dissolved or suspended immediately prior to use. Lyophilized forms are also contemplated. The pharmaceutical composition can be contained within a lipid particle or vesicle, such as a liposome or microcrystal, which is also suitable for parenteral administration. The particles can be of any suitable structure, such as unilamellar or plurilamellar, so long as compositions are contained therein. Compounds can be entrapped in “stabilized plasmid-lipid particles” (SPLP) containing the fusogenic lipid dioleoylphosphatidylethanolamine (DOPE), low levels (5-10 mol %) of cationic lipid, and stabilized by a polyethyleneglycol (PEG) coating (Zhang Y. P. et al., Gene Ther. 1999, 6: 1438-47). Positively charged lipids such as N-[1-(2,3-dioleoyloxi)propyl]-N,N,N-trimethyl-amoniummethylsulfate, or “DOTAP,” are particularly preferred for such particles and vesicles. The preparation of such lipid particles is well known. See, e.g., U.S. Pat. Nos. 4,880,635; 4,906,477; 4,911,928; 4,917,951; 4,920,016; and 4,921,757; each of which is incorporated herein by reference.

[0734] The pharmaceutical composition described herein can be administered or packaged as a unit dose, for example. The term “unit dose” when used in reference to a pharmaceutical composition of the present disclosure refers to physically discrete units suitable as unitary dosage for the subject, each unit containing a predetermined quantity of active material calculated to produce the desired therapeutic effect in association with the required diluent; i.e., carrier, or vehicle.

[0735] Further, the pharmaceutical composition can be provided as a pharmaceutical kit comprising (a) a container containing a compound of the disclosure in lyophilized form and (b) a second container containing a pharmaceutically acceptable diluent (e.g., sterile used for reconstitution or dilution of the lyophilized compound of the disclosure. Optionally associated with such container(s) can be a notice in the form prescribed by a governmental agency regulating the manufacture, use or sale of pharmaceuticals or biological products, which notice reflects approval by the agency of manufacture, use or sale for human administration.

[0736] In another aspect, an article of manufacture containing materials useful for the treatment of Rett Syndrome (RTT) is included. In some embodiments, the article of manufacture comprises a container and a label. Suitable containers include, for example, bottles, vials, syringes, and test tubes. The containers can be formed from a variety of materials such as glass or plastic. In some embodiments, the container holds a composition that is effective for treating a disease described herein and can have a sterile access port. For example, the container can be an intravenous solution bag or a vial having a stopper pierceable by a hypodermic injection needle. The active agent in the composition is a compound of the disclosure. In some embodiments, the label on or associated with the container indicates that the composition is used for treating the disease of choice. The article of manufacture can further comprise a second container comprising a pharmaceutically-acceptable buffer, such as phosphate-buffered saline, Ringer's solution, or dextrose solution. It can further include other materials desirable from a commercial and user standpoint, including other buffers, diluents, filters, needles, syringes, and package inserts with instructions for use.

[0737] In some embodiments, any of the fusion proteins, gRNAs, and/or complexes described herein are provided as part of a pharmaceutical composition. In some embodiments, the pharmaceutical composition comprises any of the fusion proteins provided herein. In some embodiments, the pharmaceutical composition comprises any of the complexes provided herein. In some embodiments, the pharmaceutical composition comprises a ribonucleoprotein complex comprising an RNA-guided nuclease (e.g., Cas9) that forms a complex with a gRNA and a cationic lipid. In some embodiments pharmaceutical composition comprises a gRNA, a nucleic acid programmable DNA binding protein, a cationic lipid, and a pharmaceutically acceptable excipient. Pharmaceutical compositions can optionally comprise one or more additional therapeutically active substances.

[0738] In some embodiments, compositions provided herein are administered to a subject, for example, to a human subject, in order to effect a targeted genomic modification within the subject. In some embodiments, cells are obtained from the subject and contacted with any of the pharmaceutical compositions provided herein. In some embodiments, cells removed from a subject and contacted ex vivo with a pharmaceutical composition are re-introduced into the subject, optionally after the desired genomic modification has been effected or detected in the cells. Methods of delivering pharmaceutical compositions comprising nucleases are known, and are described, for example, in U.S. Pat. Nos. 6,453,242; 6,503,717; 6,534,261; 6,599,692; 6,607,882; 6,689,558; 6,824,978; 6,933,113; 6,979,539; 7,013,219; and 7,163,824, the disclosures of which are incorporated by reference herein in their entireties. Although the descriptions of pharmaceutical compositions provided herein are principally directed to pharmaceutical compositions which are suitable for administration to humans, it will be understood by the skilled artisan that such compositions are generally suitable for administration to animals or organisms of all sorts, for example, for veterinary use.

[0739] Modification of pharmaceutical compositions suitable for administration to humans in order to render the compositions suitable for administration to various animals is well understood, and the ordinarily skilled veterinary pharmacologist can design and/or perform such modification with merely ordinary, if any, experimentation. Subjects to which administration of the pharmaceutical compositions is contemplated include, but are not limited to, humans and/or other primates; mammals, domesticated animals, pets, and commercially relevant mammals such as cattle, pigs, horses, sheep, cats, dogs, mice, and/or rats; and/or birds, including commercially relevant birds such as chickens, ducks, geese, and/or turkeys.

[0740] Formulations of the pharmaceutical compositions described herein can be prepared by any method known or hereafter developed in the art of pharmacology. In general, such preparatory methods include the step of bringing the active ingredient(s) into association with an excipient and/or one or more other accessory ingredients, and then, if necessary and/or desirable, shaping and/or packaging the product into a desired single- or multi-dose unit. Pharmaceutical formulations can additionally comprise a pharmaceutically acceptable excipient, which, as used herein, includes any and all solvents, dispersion media, diluents, or other liquid vehicles, dispersion or suspension aids, surface active agents, isotonic agents, thickening or emulsifying agents, preservatives, solid binders, lubricants and the like, as suited to the particular dosage form desired. Remington's The Science and Practice of Pharmacy, 21st Edition, A. R. Gennaro (Lippincott, Williams & Wilkins, Baltimore, Md., 2006; incorporated in its entirety herein by reference) discloses various excipients used in formulating pharmaceutical compositions and known techniques for the preparation thereof. See also PCT application PCT/US2010/055131 (Publication number WO2011053982 A8, filed Nov. 2, 2010), incorporated in its entirety herein by reference, for additional suitable methods, reagents, excipients and solvents for producing pharmaceutical compositions comprising a nuclease.

[0741] Except insofar as any conventional excipient medium is incompatible with a substance or its derivatives, such as by producing any undesirable biological effect or otherwise interacting in a deleterious manner with any other component(s) of the pharmaceutical composition, its use is contemplated to be within the scope of this disclosure.

[0742] The compositions, as described above, can be administered in effective amounts. The effective amount will depend upon the mode of administration, the particular condition being treated, and the desired outcome. It may also depend upon the stage of the condition, the age and physical condition of the subject, the nature of concurrent therapy, if any, and like factors well-known to the medical practitioner. For therapeutic applications, it is that amount sufficient to achieve a medically desirable result.

### Methods of Treating RETT

[0743] Provided also are methods of treating Rett Syndrome (RTT or RETT) and/or the genetic mutations in Mecp2 that cause RETT that comprise administering to a subject (e.g., a mammal, such as a human) a therapeutically effective amount of a pharmaceutical composition that comprises a polynucleotide encoding a base editor system (e.g., ABE8 base editor and gRNA) described herein. In some embodiments, the base editor is a fusion protein that comprises a polynucleotide programmable DNA binding domain and an adenosine deaminase domain. A cell of the subject is transduced with the base editor and one or more guide polynucleotides that target the base editor to effect an A⋅T to G⋅C alteration of a nucleic acid sequence containing mutations in the Mecp2 gene.

[0744] The methods herein include administering to the subject (including a subject identified as being in need of such treatment, or a subject suspected of being at risk of disease and in need of such treatment) an effective amount of a composition described herein. Identifying a subject in need of such treatment can be in the judgment of a subject or a health care professional and can be subjective (e.g., opinion) or objective (e.g., measurable by a test or diagnostic method).

[0745] The therapeutic methods, in general, comprise administration of a therapeutically effective amount of a pharmaceutical composition comprising, for example, a vector encoding a base editor and a gRNA that targets the Mecp2 gene of a subject (e.g., a human patient) in need thereof. Such treatment will be suitably administered to a subject, particularly a human subject, suffering from, having, susceptible to, or at risk for RTT. The compositions herein may be also used in the treatment of any other disorders in which RTT may be implicated.

[0746] In one embodiment, a method of monitoring treatment progress is provided. The method includes the step of determining a level of diagnostic marker (Marker) (e.g., SNP associated with RTT) or diagnostic measurement (e.g., screen, assay) in a subject suffering from or susceptible to a disorder or symptoms thereof associated with RTT in which the subject has been administered a therapeutic amount of a composition herein sufficient to treat the disease or symptoms thereof. The level of Marker determined in the method can be compared to known levels of Marker in either healthy normal controls or in other afflicted patients to establish the subject's disease status. In preferred embodiments, a second level of Marker in the subject is determined at a time point later than the determination of the first level, and the two levels are compared to monitor the course of disease or the efficacy of the therapy. In certain preferred embodiments, a pre-treatment level of Marker in the subject is determined prior to beginning treatment according to the methods of the disclosure; this pre-treatment level of Marker can then be compared to the level of Marker in the subject after the treatment commences, to determine the efficacy of the treatment.

[0747] In some embodiments, cells are obtained from the subject and contacted with a pharmaceutical composition as provided herein. In some embodiments, cells removed from a subject and contacted ex vivo with a pharmaceutical composition are re-introduced into the subject, optionally after the desired genomic modification has been affected or detected in the cells. Methods of delivering pharmaceutical compositions comprising nucleases are described, for example, in U.S. Pat. Nos. 6,453,242; 6,503,717; 6,534,261; 6,599,692; 6,607,882; 6,689,558; 6,824,978; 6,933,113; 6,979,539; 7,013,219; and 7,163,824, the disclosures of all of which are incorporated by reference herein in their entireties. Although the descriptions of pharmaceutical compositions provided herein are principally directed to pharmaceutical compositions which are suitable for administration to humans, it will be understood by the skilled artisan that such compositions are generally suitable for administration to animals or organisms of all sorts, for example, for veterinary use.

### Kits

[0748] Various aspects of this disclosure provide kits comprising a base editor system. In one embodiment, the kit comprises a nucleic acid construct comprising a nucleotide sequence encoding a nucleobase editor fusion protein. In one embodiment, the fusion protein comprises an adenine deaminase and a nucleic acid programmable DNA binding protein (napDNAbp). In some embodiments, the kit comprises at least one guide RNA capable of targeting a nucleic acid molecule of interest, e.g., Mecp2 RTT-associated mutations. In some embodiments, the kit comprises a nucleic acid construct comprising a nucleotide sequence encoding at least one guide RNA.

[0749] The kit provides, in some embodiments, instructions for using the kit to edit one or more Mecp2 RTT-associated mutations. The instructions will generally include information about the use of the kit for editing nucleic acid molecules. In other embodiments, the instructions include at least one of the following: precautions; warnings; clinical studies; and/or references. The instructions may be printed directly on the container (when present), or as a label applied to the container, or as a separate sheet, pamphlet, card, or folder supplied in or with the container. In a further embodiment, a kit can comprise instructions in the form of a label or separate insert (package insert) for suitable operational parameters. In yet another embodiment, the kit can comprise one or more containers with appropriate positive and negative controls or control samples, to be used as standard(s) for detection, calibration, or normalization. The kit can further comprise a second container comprising a pharmaceutically-acceptable buffer, such as (sterile) phosphate-buffered saline, Ringer's solution, or dextrose solution. It can further include other materials desirable from a commercial and user standpoint, including other buffers, diluents, filters, needles, syringes, and package inserts with instructions for use.

[0750] In certain embodiments, the kit is useful for the treatment of a subject having Rett Syndrome.

[0751] The practice of the present disclosure employs, unless otherwise indicated, conventional techniques of molecular biology (including recombinant techniques), microbiology, cell biology, biochemistry and immunology, which are well within the purview of the skilled artisan. Such techniques are explained fully in the literature, such as, “Molecular Cloning: A Laboratory Manual”, second edition (Sambrook, 1989); “Oligonucleotide Synthesis” (Gait, 1984); “Animal Cell Culture” (Freshney, 1987); “Methods in Enzymology” “Handbook of Experimental Immunology” (Weir, 1996); “Gene Transfer Vectors for Mammalian Cells” (Miller and Calos, 1987); “Current Protocols in Molecular Biology” (Ausubel, 1987); “PCR: The Polymerase Chain Reaction”, (Mullis, 1994); “Current Protocols in Immunology” (Coligan, 1991). These techniques are applicable to the production of the polynucleotides and polypeptides of the disclosure, and, as such, may be considered in making and practicing the disclosure. Particularly useful techniques for particular embodiments will be discussed in the sections that follow.

### EXAMPLES

[0752] The following examples are put forth so as to provide those of ordinary skill in the art with a complete disclosure and description of how to make and use the assay, screening, and therapeutic methods of the disclosure, and are not intended to limit the scope of what is described in the present disclosure and in the embodiments thereof.

### Example 1 A⋅T to G⋅C DNA Base Editing for Correction of Mecp2 RTT-Associated Mutations in Cells

[0753] Six of the eight most prevalent RTT-causing Mecp2 mutations were targeted for reversion to wild-type sequence using A⋅T to G⋅C DNA base editors (ABEs) that employ Cas9 moieties with validated protospacer adjacent motif (PAM) sequence preferences (FIG. 2). To determine which guide RNA (gRNA) and ABE-Cas9 platform is able to most efficiently and precisely correct a targeted Mecp2 mutation, an Mecp2 allele bearing RTT targetable mutations (Table 15), including R255X was genomically integrated in HEK293T cells by lentivirus transduction. Editing efficiencies of gRNAs and ABE-Cas9 editors for a given mutation were measured. Five days after transfection of DNA encoding ABE-Cas9 editors and gRNAs, cells were lysed and analyzed for base editing at the desired site by miSeq analysis.

TABLE 15
6 RETT mutations.

| Causal | | | | Cas9 PAM-enabling | editing |
|---|---|---|---|---|---|
| mutation | Target sequence | PAM | | mutations | position |
| c.316C > T | CCATGTCCAGCCTTCAGGCA | GGG | SpCas9 | | 3 |
| (2.77%) | TCCATGTCCAGCCTTCAGGC | AGG | SpCas9 | | 4 |
| R106W | TTCCATGTCCAGCCTTCAGG | CAG | SpCas9 | xCas9 | 5 |
| | GCTTCCATGTCCAGCCTTCA | GGC | SpCas9 | MQKSER/ICKSER/VRKSER; | 7 |
| | | | | Nureki | |
| | CTTCCATGTCCAGCCTTCAGG | CAGGGT | SaCas9 | | 6 |
| | AGCTTCCATGTCCAGCCTTCAGG | CAGGGT | SaCas9 | | 8 |
| | AGCTTCCATGTCCAGCCTTC | CTTA | Cpf1 | | 8 |
| | CTTAAGCTTCCATGTCCAGC | TTTG | Cpf1 | | 12 |
| C.397C > T | AGCAAAAGGCTTTTCCCTGG | GGA | SpCas9 | VRQR | 4 |
| (4.56%) | GAGCAAAAGGCTTTTCCCTG | GGG | SpCas9 | | 5 |
| R133C | AGAGCAAAAGGCTTTTCCCT | GGG | SpCas9 | | 6 |
| | TAGAGCAAAAGGCTTTTCCC | TGG | SpCas9 | | 7 |
| | TAGAGCAAAAGGCTTTTCCCT | GGGGAT | SaCas9 | | 7 |
| | TTTAGAGCAAAAGGCTTTTCCCT | GGGGAT | SaCas9 | | 9 |
| C.473C > T | CCATGAAGTCAAAATCATTA | GGG | SpCas9 | | 3 |
| (8.81%) | ACCATGAAGTCAAAATCATT | AGG | SpCas9 | | 4 |
| T158M | TACCATGAAGTCAAAATCAT | TAG | SpCas9 | xCas9; ScCas9 | 5 |
| | TTACCATGAAGTCAAAATCAT | TAGGGT | SaCas9 | | 6 |
| | AGTTACCATGAAGTCAAAATCAT | TAGGGT | SaCas9 | | 8 |
| C.763C > T | CTTTTCACTTCCTGCCGGGG | CGT | SpCas9 | LRSVQL/LRKIQK/LRSVQK; | 7 |
| (6.68%) | | | | Nureki | |
| R255X | | | | | |
| C.808C > T | TCAGCCCCGTTTCTTGGGAA | TGG | SpCas9 | | 3 |
| (5.8%) | GCTTTCAGCCCCGTTTCTTG | GGA | SpCas9 | VRQR | 7 |
| R270X | CGGCTTTCAGCCCCGTTTCTT | GGGAAT | SaCas9 | | 9 |
| | CCCGGCTTTCAGCCCCGTTTCTT | GGGAAT | SaCas9 | | 11 |
| C.916C > T | GCACTTCTTGATGGGGAGTA | CGG | SpCas9 | | 3 |
| (5.17%) | TCTTGCACTTCTTGATGGGG | AGT | SpCas9 | LRSVQL/LRKIQK/LRSVQK | 7 |
| R306C | CTTGCACTTCTTGATGGGGAG | TACGGT | SaCas9 | KKH | 6 |
| | GTCTTGCACTTCTTGATGGGGAG | TACGGT | SaCas9 | KKH | 8 |

[0754] Particular target/spacer sequences for four of the most severe mutations, R255X, R106W, T158M, and R270X, are shown in Table 16 below:

TABLE 16
Rett Mutation Target and PAM Sequences

| Mutation | Spacer | PAM |
|---|---|---|
| R255X | CTTTTC [symbol] CTTCCTGCCGGGG | NGTT |
| R106W | AGCTTCC [symbol] TGTCCAGCCTTC | NGG |
| T158M | ACC [symbol] TGAAGTCAAAATCATT | NGG |
| R270X | GCTTTC [symbol] GCCCCGTTTCTTG | NGG |

The above target/spacer sequences show a targetable “a” nucleobase in bold and underlining. The R255X mutation may be targeted using a NGTT PAM variant and the R106W, T158M, and R270X mutations may be targeted using a NGG PAM.

### Example 2 Base Editing for the Correction of the R106W Mutation

[0755] R106W is one of the four most severe mutations in Rett Syndrome. ABEs may be used for the correction of R106W by efficiently converting A>G at a targeted site. Base editing was tested in the MECP2-HEK293T cell line, which contains a single, genomically integrated copy of MECP2 containing RETT mutations as discussed in Example 1. Five (5) guide RNAs (gRNAs) were tested targeting the R106W mutation in RTT with ABE8 base editor variants (FIG. 3).

[0756] The gRNA encompasses the scaffold sequence and the spacer sequence (target sequence) for disease-associated genes as provided herein or as determined based on the knowledge of the skilled practitioner and as would be understood to the skilled practitioner in the art. (See, e.g., Komor, A. C., et al., “Programmable editing of a target base in genomic DNA without double-stranded DNA cleavage” Nature 533, 420-424 (2016); Gaudelli, N. M., et al., “Programmable base editing of A⋅T to G⋅C in genomic DNA without DNA cleavage” Nature 551, 464-471 (2017); Komor, A. C., et al., “Improved base excision repair inhibition and bacteriophage Mu Gam protein yields C:G-to-T:A base editors with higher efficiency and product purity” Science Advances 3:eaao4774 (2017), and Rees, H. A., et al., “Base editing: precision chemistry on the genome and transcriptome of living cells.” Nat Rev Genet. 2018 December; 19(12):770-788. doi: 10.1038/s41576-018-0059-1).

[0757] The five (5) DNA target sequences for the R106W mutation are provided below:

DNA target sequence 1:
CCATGTCCAGCCTTCAGGCA [symbol]
DNA target sequence 2:
TCCATGTCCAGCCTTCAGGC [symbol]
DNA target sequence 3:
TTCCATGTCCAGCCTTCAGG [symbol]
DNA target sequence 4:
GCTTCCATGTCCAGCCTTCA [symbol]
DNA target sequence 5:
AGCTTCCATGTCCAGCCTTC

[symbol]

PAM sequences are underlined and in bold font. As shown in Table 15 above, target sequences 1, 2 and 5 utilize a NGG PAM (i.e., SpCas9). Target sequence 3 requires xCas9 (as described in Liu et al. WO2017070633, incorporated herein by reference). Target sequence 4 requires Cas9 PAM variants (as described in Joung et al. WO2019040650, incorporated herein by reference).

[0758] The five (5) guide RNA sequences, which hybridize to the complement of each of the above DNA target sequences, are as follows:

gRNA1:
5′-gCCAUGUCCAGCCUUCAGGCA-3′
gRNA2:
5′-gUCCAUGUCCAGCCUUCAGGC-3′
gRNA3:
5′-gUUCCAUGUCCAGCCUUCAGG-3′
gRNA4:
5′-GCUUCCAUGUCCAGCCUUCA-3′
gRNA5:
5′-gAGCUUCCAUGUCCAGCCUUC-3′

A lowercase “g” in both the DNA target sequences and the gRNA sequences indicates a mismatch in the sequence where a polymerase must initiate transcription. In some embodiments, a guide polynucleotide may be truncated by 1, 2, 3, 4, etc. nucleotides, particularly at the 5′ end.

[0759] For each of the gRNAs, the scaffold sequence is as follows: GTTTTAGAGCTAGAAATAGCAAGTTAAAATAAGGCTAGTCCGTTATCAACTtGAAAAAGTGGCAC CGAGTCGGTGCTTTTTTT. As will be appreciated by one having skill in the art, in a guide polynucleotide sequence (gRNA) uracil (U) replaces thymine (T) in the sequence.

[0760] The ABE base editors used include ABE8 heterodimer variants: ABE8.14, ABE8.15, ABE8.16, ABE8.17, ABE8.18, ABE8.19, ABE8.20, ABE8.21, ABE8.22, ABE8.23, ABE8.24, ABE8.25, and ABE8.26 (see Table 9). Positive control base editor ABE7.10 and a negative control were also used for comparison.

[0761] For plasmid transfections, HEK293T cells were transfected and plated with 250 ng of gRNA and 750 ng of ABE8 variant base editor expression plasmid using Opti-MEM media and Lipofectamine 2000. The ABE8 base editor variants were used having the NGG PAM sequence. The cells were lysed and prepped for sequencing 5 days post-transfection (with a media change at day 3 post-transfection).

[0762] Out of the five (5) gRNA sequences, gRNA1, gRNA2, and gRNA5 provided the best A to G editing (FIG. 3). The ABE8 base editor variants had increased base editing activity compared to the ABE7.10 control. As shown in FIG. 3, the amount of A to G gene editing achieved was about 35% using gRNA2.

### Example 3 Base Editing for the Correction of an R133C Mutation

[0763] ABEs may be used for the correction of the R133C by efficiently converting A>G at a targeted site. (FIGS. 1 and 2). Base editing is tested in the MECP2-HEK293T cell line, which contains a single, genomically integrated copy of MECP2 containing RETT mutations as discussed in Example 1. Four (4) guide RNAs (gRNAs) are tested targeting the R133C mutation in RETT with ABE8 base editor variants.

[0764] The gRNA encompasses the scaffold sequence and the spacer sequence (target sequence) for disease-associated genes as provided herein or as determined based on the knowledge of the skilled practitioner and as would be understood to the skilled practitioner in the art. (See, e.g., Komor, A. C., et al., “Programmable editing of a target base in genomic DNA without double-stranded DNA cleavage” Nature 533, 420-424 (2016); Gaudelli, N. M., et al., “Programmable base editing of A⋅T to G⋅C in genomic DNA without DNA cleavage” Nature 551, 464-471 (2017); Komor, A. C., et al., “Improved base excision repair inhibition and bacteriophage Mu Gam protein yields C:G-to-T:A base editors with higher efficiency and product purity” Science Advances 3:eaao4774 (2017), and Rees, H. A., et al., “Base editing: precision chemistry on the genome and transcriptome of living cells.” Nat Rev Genet. 2018 December; 19(12):770-788. doi: 10.1038/s41576-018-0059-1).

[0765] Four (4) DNA target sequences for the R133C mutation are provided below:

DNA target sequence 1:
AGAGCAAAAGGCTTTTCCCT
DNA target sequence 2:
TAGAGCAAAAGGCTTTTCCC
DNA target sequence 3:
AGAGCAAAAGGCTTTTCCCT
DNA target sequence 4:
TTTAGAGCAAAAGGCTTTTCCCT

The target sequences utilize PAM sequences as shown in Table 15 above. Target sequences 1 and 2 utilize SpCas9. Target sequences 3 and 4 utilize SaCas9.

[0766] Four (4) guide RNA sequences (gRNAs), which hybridize to the complement of each of the above DNA target sequences, are as follows:

gRNA1:
5′-gAGAGCAAAAGGCUUUUCCCU-3′
gRNA2:
5′-gUAGAGCAAAAGGCUUUUCCC-3′
gRNA3:
5′-gUAGAGCAAAAGGCUUUUCCCU-3′
gRNA4:
5′-gUUUAGAGCAAAAGGCUUUUCCCU-3′

A lowercase “g” in both the DNA target sequences and the gRNA sequences indicates a mismatch in the sequence where a polymerase must initiate transcription. In some embodiments, a guide polynucleotide may be truncated by 1, 2, 3, 4, etc. nucleotides, particularly at the 5′ end.

[0767] For each of the gRNAs, the scaffold sequence is as follows: GTTTTAGAGCTAGAAATAGCAAGTTAAAATAAGGCTAGTCCGTTATCAACTtGAAAAAGTGGCAC CGAGTCGGTGCTTTTTTT. As will be appreciated by one having skill in the art, in a guide polynucleotide sequence (gRNA) uracil (U) replaces thymine (T) in the sequence.

[0768] ABE base editors for use include ABE8 heterodimer variants: ABE8.14, ABE8.15, ABE8.16, ABE8.17, ABE8.18, ABE8.19, ABE8.20, ABE8.21, ABE8.22, ABE8.23, ABE8.24, ABE8.25, and ABE8.26 (see Table 9). Positive control base editor ABE7.10 and a negative control are also used for comparison.

[0769] For plasmid transfections, HEK293T cells are transfected and plated with 250 ng of gRNA and 750 ng of ABE8 variant base editor expression plasmid using Opti-MEM media and Lipofectamine 2000. The cells are lysed and prepped for sequencing 5 days post-transfection (with a change of medium at day 3 post-transfection).

### Example 4 Base Editing for the Correction of an R306C Mutation

[0770] ABEs may be used for the correction of the R306C by efficiently converting A>G at a targeted site. (FIGS. 1 and 2). Base editing is tested in the MECP2-HEK293T cell line, which contains a single, genomically integrated copy of MECP2 containing RETT mutations as discussed in Example 1. Three (3) guide RNAs (gRNAs) are tested targeting the R306C mutation in RETT with ABE8 base editor variants.

[0771] The gRNA encompasses the scaffold sequence and the spacer sequence (target sequence) for disease-associated genes as provided herein or as determined based on the knowledge of the skilled practitioner and as would be understood to the skilled practitioner in the art. (See, e.g., Komor, A. C., et al., “Programmable editing of a target base in genomic DNA without double-stranded DNA cleavage” Nature 533, 420-424 (2016); Gaudelli, N. M., et al., “Programmable base editing of A⋅T to G⋅C in genomic DNA without DNA cleavage” Nature 551, 464-471 (2017); Komor, A. C., et al., “Improved base excision repair inhibition and bacteriophage Mu Gam protein yields C:G-to-T:A base editors with higher efficiency and product purity” Science Advances 3:eaao4774 (2017), and Rees, H. A., et al., “Base editing: precision chemistry on the genome and transcriptome of living cells.” Nat Rev Genet. 2018 December; 19(12):770-788. doi: 10.1038/s41576-018-0059-1).

[0772] Three (3) DNA target sequences for the R306C mutation are provided below:

DNA target sequence 1:
TCTTGCACTTCTTGATGGGG
DNA target sequence 2:
CTTGCACTTCTTGATGGGGAG
DNA target sequence 3:
GTCTTGCACTTCTTGATGGGGAG

The target sequences utilize PAM sequences as shown in Table 15 above. Target sequence 1 utilizes SpCas9. Target sequences 2 and 3 utilize SaCas9.

[0773] Three (3) guide RNA sequences (gRNAs), which hybridize to the complement of each of the above DNA target sequences, are as follows:

gRNA1:
5′-gUCUUGCACUUCUUGAUGGGG-3′
gRNA2:
5′-gCUUGCACUUCUUGAUGGGGAG-3′
gRNA3:
5′-gGUCUUGCACUUCUUGAUGGGGAG-3′

A lowercase “g” in both the DNA target sequences and the gRNA sequences indicates a mismatch in the sequence where a polymerase must initiate transcription. In some embodiments, a guide polynucleotide may be truncated by 1, 2, 3, 4, etc. nucleotides, particularly at the 5′ end.

[0774] For each of the gRNAs, the scaffold sequence is as follows: GTTTTAGAGCTAGAAATAGCAAGTTAAAATAAGGCTAGTCCGTTATCAACTTGAAAAAGTGGCAC CGAGTCGGTGCTTTTTTT. As will be appreciated by one having skill in the art, in a guide polynucleotide sequence (gRNA) uracil (U) replaces thymine (T) in the sequence.

[0775] ABE base editors for use include ABE8 heterodimer variants: ABE8.14, ABE8.15, ABE8.16, ABE8.17, ABE8.18, ABE8.19, ABE8.20, ABE8.21, ABE8.22, ABE8.23, ABE8.24, ABE8.25, and ABE8.26 (see Table 9). Positive control base editor ABE7.10 and a negative control are also used for comparison.

[0776] For plasmid transfections, HEK293T cells are transfected and plated with 250 ng of gRNA and 750 ng of ABE8 variant base editor expression plasmid using Opti-MEM media and Lipofectamine 2000. The cells are lysed and prepped for sequencing 5 days post-transfection (with a change of medium at day 3 post-transfection).

The application's sequence listing, which the Patent Office published only in electronic form, follows.

SEQUENCE LISTING (256 sequences)

SEQ ID NO: 1 - protein, 167 aa, Artificial Sequence
  Description of Artificial Sequence: Synthetic polypeptide
MSEVEFSHEYWMRHALTLAKRARDEREVPVGAVLVLNNRVIGEGWNRAIGLHDPTAHAEIMALRQGGLVMQNYRLIDATLYVTFEPCVMCAGAMIHSRIGRVVFGVRNAKTGAAGSLMDVLHYPGMNHRVEITEGILADECAALLCYFFRMPRQVFNAQKKAQSSTD

SEQ ID NO: 2 - RNA, 20 nt, Artificial Sequence
  Description of Artificial Sequence: Synthetic oligonucleotide
agagcaaaaggcuuuucccu

SEQ ID NO: 3 - RNA, 20 nt, Artificial Sequence
  Description of Artificial Sequence: Synthetic oligonucleotide
uagagcaaaaggcuuuuccc

SEQ ID NO: 4 - RNA, 21 nt, Artificial Sequence
  Description of Artificial Sequence: Synthetic oligonucleotide
uagagcaaaaggcuuuucccu

SEQ ID NO: 5 - RNA, 23 nt, Artificial Sequence
  Description of Artificial Sequence: Synthetic oligonucleotide
uuuagagcaaaaggcuuuucccu

SEQ ID NO: 6 - RNA, 20 nt, Artificial Sequence
  Description of Artificial Sequence: Synthetic oligonucleotide
ucuugcacuucuugaugggg

SEQ ID NO: 7 - RNA, 21 nt, Artificial Sequence
  Description of Artificial Sequence: Synthetic oligonucleotide
cuugcacuucuugauggggag

SEQ ID NO: 8 - RNA, 23 nt, Artificial Sequence
  Description of Artificial Sequence: Synthetic oligonucleotide
gucuugcacuucuugauggggag

SEQ ID NO: 9 - protein, 167 aa, Artificial Sequence
  Description of Artificial Sequence: Synthetic polypeptide
MSEVEFSHEYWMRHALTLAKRARDEREVPVGAVLVLNNRVIGEGWNRAIGLHDPTAHAEIMALRQGGLVMQNYRLIDATLYVTFEPCVMCAGAMIHSRIGRVVFGVRNAKTGAAGSLMDVLHYPGMNHRVEITEGILADECAALLCTFFRMPRQVFNAQKKAQSSTD

SEQ ID NO: 10 - DNA, 83 bp, Artificial Sequence
  Description of Artificial Sequence: Synthetic oligonucleotide
gttttagagctagaaatagcaagttaaaataaggctagtccgttatcaacttgaaaaagtggcaccgagtcggtgcttttttt

SEQ ID NO: 11 - protein, 167 aa, Unknown
  Description of Unknown: TadA sequence
MSEVEFSHEYWMRHALTLAKRAWDEREVPVGAVLVHNNRVIGEGWNRPIGRHDPTAHAEIMALRQGGLVMQNYRLIDATLYVTLEPCVMCAGAMIHSRIGRVVFGARDAKTGAAGSLMDVLHHPGMNHRVEITEGILADECAALLSDFFRMRRQEIKAQKKAQSSTD

SEQ ID NO: 12 - protein, 160 aa, Staphylococcus aureus
MGSHMTNDIYFMTLAIEEAKKAAQLGEVPIGAIITKDDEVIARAHNLRETLQQPTAHAEHIAIERAAKVLGSWRLEGCTLYVTLEPCVMCAGTIVMSRIPRVVYGADDPKGGCSGSLMNLLQQSNFNHRAIVDKGVLKEACSTLLTTFFKNLRANKKSTN

SEQ ID NO: 13 - protein, 161 aa, Bacillus subtilis
MTQDELYMKEAIKEAKKAEEKGEVPIGAVLVINGEIIARAHNLRETEQRSIAHAEMLVIDEACKALGTWRLEGATLYVTLEPCPMCAGAVVLSRVEKVVFGAFDPKGGCSGTLMNLLQEERFNHQAEVVSGVLEEECGGMLSAFFRELRKKKKAARKNLSE

SEQ ID NO: 14 - protein, 183 aa, Salmonella typhimurium
MPPAFITGVTSLSDVELDHEYWMRHALTLAKRAWDEREVPVGAVLVHNHRVIGEGWNRPIGRHDPTAHAEIMALRQGGLVLQNYRLLDTTLYVTLEPCVMCAGAMVHSRIGRVVFGARDAKTGAAGSLIDVLHHPGMNHRVEIIEGVLRDECATLLSDFFRMRRQEIKALKKADRAEGAGPAV

SEQ ID NO: 15 - protein, 164 aa, Shewanella putrefaciens
MDEYWMQVAMQMAEKAEAAGEVPVGAVLVKDGQQIATGYNLSISQHDPTAHAEILCLRSAGKKLENYRLLDATLYITLEPCAMCAGAMVHSRIARVVYGARDEKTGAAGTVVNLLQHPAFNHQVEVTSGVLAEACSAQLSRFFKRRRDEKKALKLAQRAQQGIE

SEQ ID NO: 16 - protein, 173 aa, Haemophilus influenzae
MDAAKVRSEFDEKMMRYALELADKAEALGEIPVGAVLVDDARNIIGEGWNLSIVQSDPTAHAEIIALRNGAKNIQNYRLLNSTLYVTLEPCTMCAGAILHSRIKRLVFGASDYKTGAIGSRFHFFDDYKMNHTLEITSGVLAEECSQKLSTFFQKRREEKKIEKALLKSLSDK

SEQ ID NO: 17 - protein, 161 aa, Caulobacter crescentus
MRTDESEDQDHRMMRLALDAARAAAEAGETPVGAVILDPSTGEVIATAGNGPIAAHDPTAHAEIAAMRAAAAKLGNYRLTDLTLVVTLEPCAMCAGAISHARIGRVVFGADDPKGGAVVHGPKFFAQPTCHWRPEVTGGVLADESADLLRGFFRARRKAKI

SEQ ID NO: 18 - protein, 179 aa, Geobacter sulfurreducens
MSSLKKTPIRDDAYWMGKAIREAAKAAARDEVPIGAVIVRDGAVIGRGHNLREGSNDPSAHAEMIAIRQAARRSANWRLTGATLYVTLEPCLMCMGAIILARLERVVFGCYDPKGGAAGSLYDLSADPRLNHQVRLSPGVCQEECGTMLSDFFRDLRRRKKAKATPALFIDERKVPPEP

SEQ ID NO: 19 - protein, 486 aa, Homo sapiens
MVAGMLGLREEKSEDQDLQGLKDKPLKFKKVKKDKKEEKEGKHEPVQPSAHHSAEPAEAGKAETSEGSGSAPAVPEASASPKQRRSIIRDRGPMYDDPTLPEGWTRKLKQRKSGRSAGKYDVYLINPQGKAFRSKVELIAYFEKVGDTSLDPNDFDFTVTGRGSPSRREQKPPKKPKSPKAPGTGRGRGRPKGSGTTRPKAATSEGVQVKRVLEKSPGKLLVKMPFQTSPGGKAEGGGATTSTQVMVIKRPGRKRKAEADPQAIPKKRGRKPGSVVAAAAAEAKKKAVKESSIRSVQETVLPIKKRKTRETVSIEVKEVVKPLLVSTLGEKSGKGLKTCKSPGRKSKESSPKGRSSSASSPPKKEHHHHHHHSESPKAPVPLLPPLPPPPPEPESSEDPTSPPEPQDLSSSVCKEEKMPRGGSLESDGCPKEPAKTQPAVATAATAAEKYKHRGEGERKDIVSSSMPRPNREEPVDSRTPVTERVS

SEQ ID NO: 20 - DNA, 10241 bp, Homo sapiens
ccggcgtcggcggcgcgcgcgctccctcctctcggagagagggctgtggtaaaagccgtccggaaaatggccgccgccgccgccgccgcgccgagcggaggaggaggaggaggcgaggaggagagactgctccataaaaatacagactcaccagttcctgctttgatgtgacatgtgactccccagaatacaccttgcttctgtagaccagctccaacaggattccatggtagctgggatgttagggctcagggaagaaaagtcagaagaccaggacctccagggcctcaaggacaaacccctcaagtttaaaaaggtgaagaaagataagaaagaagagaaagagggcaagcatgagcccgtgcagccatcagcccaccactctgctgagcccgcagaggcaggcaaagcagagacatcagaagggtcaggctccgccccggctgtgccggaagcttctgcctcccccaaacagcggcgctccatcatccgtgaccggggacccatgtatgatgaccccaccctgcctgaaggctggacacggaagcttaagcaaaggaaatctggccgctctgctgggaagtatgatgtgtatttgatcaatccccagggaaaagcctttcgctctaaagtggagttgattgcgtacttcgaaaaggtaggcgacacatccctggaccctaatgattttgacttcacggtaactgggagagggagcccctcccggcgagagcagaaaccacctaagaagcccaaatctcccaaagctccaggaactggcagaggccggggacgccccaaagggagcggcaccacgagacccaaggcggccacgtcagagggtgtgcaggtgaaaagggtcctggagaaaagtcctgggaagctccttgtcaagatgccttttcaaacttcgccagggggcaaggctgaggggggtggggccaccacatccacccaggtcatggtgatcaaacgccccggcaggaagcgaaaagctgaggccgaccctcaggccattcccaagaaacggggccgaaagccggggagtgtggtggcagccgctgccgccgaggccaaaaagaaagccgtgaaggagtcttctatccgatctgtgcaggagaccgtactccccatcaagaagcgcaagacccgggagacggtcagcatcgaggtcaaggaagtggtgaagcccctgctggtgtccaccctcggtgagaagagcgggaaaggactgaagacctgtaagagccctgggcggaaaagcaaggagagcagccccaaggggcgcagcagcagcgcctcctcaccccccaagaaggagcaccaccaccatcaccaccactcagagtccccaaaggcccccgtgccactgctcccacccctgcccccacctccacctgagcccgagagctccgaggaccccaccagcccccctgagccccaggacttgagcagcagcgtctgcaaagaggagaagatgcccagaggaggctcactggagagcgacggctgccccaaggagccagctaagactcagcccgcggttgccaccgccgccacggccgcagaaaagtacaaacaccgaggggagggagagcgcaaagacattgtttcatcctccatgccaaggccaaacagagaggagcctgtggacagccggacgcccgtgaccgagagagttagctgactttacacggagcggattgcaaagcaaaccaacaagaataaaggcagctgttgtctcttctccttatgggtagggctctgacaaagcttcccgattaactgaaataaaaaatatttttttttctttcagtaaacttagagtttcgtggcttcagggtgggagtagttggagcattggggatgtttttcttaccgacaagcacagtcaggttgaagacctaaccagggccagaagtagctttgcacttttctaaactaggctccttcaacaaggcttgctgcagatactactgaccagacaagctgttgaccaggcacctcccctcccgcccaaacctttcccccatgtggtcgttagagacagagcgacagagcagttgagaggacactcccgttttcggtgccatcagtgccccgtctacagctcccccagctccccccacctcccccactcccaaccacgttgggacagggaggtgtgaggcaggagagacagttggattctttagagaagatggatatgaccagtggctatggcctgtgcgatcccacccgtggtggctcaagtctggccccacaccagccccaatccaaaactggcaaggacgcttcacaggacaggaaagtggcacctgtctgctccagctctggcatggctaggaggggggagtcccttgaactactgggtgtagactggcctgaaccacaggagaggatggcccagggtgaggtggcatggtccattctcaagggacgtcctccaacgggtggcgctagaggccatggaggcagtaggacaaggtgcaggcaggctggcctggggtcaggccgggcagagcacagcggggtgagagggattcctaatcactcagagcagtctgtgacttagtggacaggggagggggcaaagggggaggagaagaaaatgttcttccagttactttccaattctcctttagggacagcttagaattatttgcactattgagtcttcatgttcccacttcaaaacaaacagatgctctgagagcaaactggcttgaattggtgacatttagtccctcaagccaccagatgtgacagtgttgagaactacctggatttgtatatatacctgcgcttgttttaaagtgggctcagcacatagggttcccacgaagctccgaaactctaagtgtttgctgcaattttataaggacttcctgattggtttctcttctccccttccatttctgccttttgttcatttcatcctttcacttctttcccttcctccgtcctcctccttcctagttcatcccttctcttccaggcagccgcggtgcccaaccacacttgtcggctccagtccccagaactctgcctgccctttgtcctcctgctgccagtaccagccccaccctgttttgagccctgaggaggccttgggctctgctgagtccgacctggcctgtctgtgaagagcaagagagcagcaaggtcttgctctcctaggtagccccctcttccctggtaagaaaaagcaaaaggcatttcccaccctgaacaacgagccttttcacccttctactctagagaagtggactggaggagctgggcccgatttggtagttgaggaaagcacagaggcctcctgtggcctgccagtcatcgagtggcccaacaggggctccatgccagccgaccttgacctcactcagaagtccagagtctagcgtagtgcagcagggcagtagcggtaccaatgcagaactcccaagacccgagctgggaccagtacctgggtccccagcccttcctctgctcccccttttccctcggagttcttcttgaatggcaatgttttgcttttgctcgatgcagacagggggccagaacaccacacatttcactgtctgtctggtccatagctgtggtgtaggggcttagaggcatgggcttgctgtgggtttttaattgatcagttttcatgtgggatcccatctttttaacctctgttcaggaagtccttatctagctgcatatcttcatcatattggtatatccttttctgtgtttacagagatgtctcttatatctaaatctgtccaactgagaagtaccttatcaaagtagcaaatgagacagcagtcttatgcttccagaaacacccacaggcatgtcccatgtgagctgctgccatgaactgtcaagtgtgtgttgtcttgtgtatttcagttattgtccctggcttccttactatggtgtaatcatgaaggagtgaaacatcatagaaactgtctagcacttccttgccagtctttagtgatcaggaaccatagttgacagttccaatcagtagcttaagaaaaaaccgtgtttgtctcttctggaatggttagaagtgagggagtttgccccgttctgtttgtagagtctcatagttggactttctagcatatatgtgtccatttccttatgctgtaaaagcaagtcctgcaaccaaactcccatcagcccaatccctgatccctgatcccttccacctgctctgctgatgacccccccagcttcacttctgactcttccccaggaagggaaggggggtcagaagagagggtgagtcctccagaactcttcctccaaggacagaaggctcctgcccccatagtggcctcgaactcctggcactaccaaaggacacttatccacgagagcgcagcatccgaccaggttgtcactgagaagatgtttattttggtcagttgggtttttatgtattatacttagtcaaatgtaatgtggcttctggaatcattgtccagagctgcttccccgtcacctgggcgtcatctggtcctggtaagaggagtgcgtggcccaccaggcccccctgtcacccatgacagttcattcagggccgatggggcagtcgtggttgggaacacagcatttcaagcgtcactttatttcattcgggccccacctgcagctccctcaaagaggcagttgcccagcctctttcccttccagtttattccagagctgccagtggggcctgaggctccttagggttttctctctatttccccctttcttcctcattccctcgtctttcccaaaggcatcacgagtcagtcgcctttcagcaggcagccttggcggtttatcgccctggcaggcaggggccctgcagctctcatgctgcccctgccttggggtcaggttgacaggaggttggagggaaagccttaagctgcaggattctcaccagctgtgtccggcccagttttggggtgtgacctcaatttcaattttgtctgtacttgaacattatgaagatgggggcctctttcagtgaatttgtgaacagcagaattgaccgacagctttccagtacccatggggctaggtcattaaggccacatccacagtctcccccacccttgttccagttgttagttactacctcctctcctgacaatactgtatgtcgtcgagctccccccaggtctacccctcccggccctgcctgctggtgggcttgtcatagccagtgggattgccggtcttgacagctcagtgagctggagatacttggtcacagccaggcgctagcacagctcccttctgttgatgctgtattcccatatcaaaagacacaggggacacccagaaacgccacatcccccaatccatcagtgccaaactagccaacggccccagcttctcagctcgctggatggcggaagctgctactcgtgagcgccagtgcgggtgcagacaatcttctgttgggtggcatcattccaggcccgaagcatgaacagtgcacctgggacagggagcagccccaaattgtcacctgcttctctgcccagcttttcattgctgtgacagtgatggcgaaagagggtaataaccagacacaaactgccaagttgggtggagaaaggagtttctttagctgacagaatctctgaattttaaatcacttagtaagcggctcaagcccaggagggagcagagggatacgagcggagtcccctgcgcgggaccatctggaattggtttagcccaagtggagcctgacagccagaactctgtgtcccccgtctaaccacagctccttttccagagcattccagtcaggctctctgggctgactgggccaggggaggttacaggtaccagttctttaagaagatctttgggcatatacatttttagcctgtgtcattgccccaaatggattcctgtttcaagttcacacctgcagattctaggacctgtgtcctagacttcagggagtcagctgtttctagagttcctaccatggagtgggtctggaggacctgcccggtgggggggcagagccctgctccctccgggtcttcctactcttctctctgctctgacgggatttgttgattctctccattttggtgtctttctcttttagatattgtatcaatctttagaaaaggcatagtctacttgttataaatcgttaggatactgcctcccccagggtctaaaattacatattagaggggaaaagctgaacactgaagtcagttctcaacaatttagaaggaaaacctagaaaacatttggcagaaaattacatttcgatgtttttgaatgaatacgagcaagcttttacaacagtgctgatctaaaaatacttagcacttggcctgagatgcctggtgagcattacaggcaaggggaatctggaggtagccgacctgaggacatggcttctgaacctgtcttttgggagtggtatggaaggtggagcgttcaccagtgacctggaaggcccagcaccaccctccttcccactcttctcatcttgacagagcctgccccagcgctgacgtgtcaggaaaacacccagggaactaggaaggcacttctgcctgaggggcagcctgccttgcccactcctgctctgctcgcctcggatcagctgagccttctgagctggcctctcactgcctccccaaggccccctgcctgccctgtcaggaggcagaaggaagcaggtgtgagggcagtgcaaggagggagcacaacccccagctcccgctccgggctccgacttgtgcacaggcagagcccagaccctggaggaaatcctacctttgaattcaagaacatttggggaatttggaaatctctttgcccccaaacccccattctgtcctacctttaatcaggtcctgctcagcagtgagagcagatgaggtgaaaaggccaagaggtttggctcctgcccactgatagcccctctccccgcagtgtttgtgtgtcaagtggcaaagctgttcttcctggtgaccctgattatatccagtaacacatagactgtgcgcataggcctgctttgtctcctctatcctgggcttttgttttgctttttagttttgcttttagtttttctgtcccttttatttaacgcaccgactagacacacaaagcagttgaatttttatatatatatctgtatattgcacaattataaactcattttgcttgtggctccacacacacaaaaaaagacctgttaaaattatacctgttgcttaattacaatatttctgataaccatagcataggacaagggaaaataaaaaaagaaaaaaaagaaaaaaaaacgacaaatctgtctgctggtcacttcttctgtccaagcagattcgtggtcttttcctcgcttctttcaagggctttcctgtgccaggtgaaggaggctccaggcagcacccaggttttgcactcttgtttctcccgtgcttgtgaaagaggtcccaaggttctgggtgcaggagcgctcccttgacctgctgaagtccggaacgtagtcggcacagcctggtcgccttccacctctgggagctggagtccactggggtggcctgactcccccagtccccttcccgtgacctggtcagggtgagcccatgtggagtcagcctcgcaggcctccctgccagtagggtccgagtgtgtttcatccttcccactctgtcgagcctgggggctggagcggagacgggaggcctggcctgtctcggaacctgtgagctgcaccaggtagaacgccagggaccccagaatcatgtgcgtcagtccaaggggtcccctccaggagtagtgaagactccagaaatgtccctttcttctcccccatcctacgagtaattgcatttgcttttgtaattcttaatgagcaatatctgctagagagtttagctgtaacagttctttttgatcatctttttttaataattagaaacaccaaaaaaatccagaaacttgttcttccaaagcagagagcattataatcaccagggccaaaagcttccctccctgctgtcattgcttcttctgaggcctgaatccaaaagaaaaacagccataggccctttcagtggccgggctacccgtgagcccttcggaggaccagggctggggcagcctctgggcccacatccggggccagctccggcgtgtgttcagtgttagcagtgggtcatgatgctctttcccacccagcctgggataggggcagaggaggcgaggaggccgttgccgctgatgtttggccgtgaacaggtgggtgtctgcgtgcgtccacgtgcgtgttttctgactgacatgaaatcgacgcccgagttagcctcacccggtgacctctagccctgcccggatggagcggggcccacccggttcagtgtttctggggagctggacagtggagtgcaaaaggcttgcagaacttgaagcctgctccttcccttgctaccacggcctcctttccgtttgatttgtcactgcttcaatcaataacagccgctccagagtcagtagtcaatgaatatatgaccaaatatcaccaggactgttactcaatgtgtgccgagcccttgcccatgctgggctcccgtgtatctggacactgtaacgtgtgctgtgtttgctccccttccccttccttctttgccctttacttgtctttctggggtttttctgtttgggtttggtttggtttttatttctccttttgtgttccaaacatgaggttctctctactggtcctcttaactgtggtgttgaggcttatatttgtgtaatttttggtgggtgaaaggaattttgctaagtaaatctcttctgtgtttgaactgaagtctgtattgtaactatgtttaaagtaattgttccagagacaaatatttctagacactttttctttacaaacaaaagcattcggagggagggggatggtgactgagatgagaggggagagctgaacagatgacccctgcccagatcagccagaagccacccaaagcagtggagcccaggagtcccactccaagccagcaagccgaatagctgatgtgttgccactttccaagtcactgcaaaaccaggttttgttccgcccagtggattcttgttttgcttcccctccccccgagattattaccaccatcccgtgcttttaaggaaaggcaagattgatgtttccttgaggggagccaggaggggatgtgtgtgtgcagagctgaagagctggggagaatggggctgggcccacccaagcaggaggctgggacgctctgctgtgggcacaggtcaggctaatgttggcagatgcagctcttcctggacaggccaggtggtgggcattctctctccaaggtgtgccccgtgggcattactgtttaagacacttccgtcacatcccaccccatcctccagggctcaacactgtgacatctctattccccaccctccccttcccagggcaataaaatgaccatggagggggcttgcactctcttggctgtcacccgatcgccagcaaaacttagatgtgagaaaaccccttcccattccatggcgaaaacatctccttagaaaagccattaccctcattaggcatggttttgggctcccaaaacacctgacagcccctccctcctctgagaggcggagagtgctgactgtagtgaccattgcatgccgggtgcagcatctggaagagctaggcagggtgtctgccccctcctgagttgaagtcatgctcccctgtgccagcccagaggccgagagctatggacagcattgccagtaacacaggccaccctgtgcagaagggagctggctccagcctggaaacctgtctgaggttgggagaggtgcacttggggcacagggagaggccgggacacacttagctggagatgtctctaaaagccctgtatcgtattcaccttcagtttttgtgttttgggacaattactttagaaaataagtaggtcgttttaaaaacaaaaattattgattgcttttttgtagtgttcagaaaaaaggttctttgtgtatagccaaatgactgaaagcactgatatatttaaaaacaaaaggcaatttattaaggaaatttgtaccatttcagtaaacctgtctgaatgtacctgtatacgtttcaaaaacaccccccccccactgaatccctgtaacctatttattatataaagagtttgccttataaattt

SEQ ID NO: 21 - protein, 1410 aa, Artificial Sequence
  Description of Artificial Sequence: Synthetic polypeptide
EIGKATAKYFFYSNIMNFFKTEITLANGEIRKRPLIETNGETGEIVWDKGRDFATVRKVLSMPQVNIVKKTEVQTGGFSKESILPKRNSDKLIARKKDWDPKKYGGFMQPTVAYSVLVVAKVEKGKSKKLKSVKELLGITIMERSSFEKNPIDFLEAKGYKEVKKDLIIKLPKYSLFELENGRKRMLASAKFLQKGNELALPSKYVNFLYLASHYEKLKGSPEDNEQKQLFVEQHKHYLDEIIEQISEFSKRVILADANLDKVLSAYNKHRDKPIREQAENIIHLFTLTNLGAPRAFKYFDTTIARKEYRSTKEVLDATLIHQSITGLYETRIDLSQLGGDGGSGGSGGSGGSGGSGGSGGMDKKYSIGLAIGTNSVGWAVITDEYKVPSKKFKVLGNTDRHSIKKNLIGALLFDSGETAEATRLKRTARRRYTRRKNRICYLQEIFSNEMAKVDDSFFHRLEESFLVEEDKKHERHPIFGNIVDEVAYHEKYPTIYHLRKKLVDSTDKADLRLIYLALAHMIKFRGHFLIEGDLNPDNSDVDKLFIQLVQTYNQLFEENPINASGVDAKAILSARLSKSRRLENLIAQLPGEKKNGLFGNLIALSLGLTPNFKSNFDLAEDAKLQLSKDTYDDDLDNLLAQIGDQYADLFLAAKNLSDAILLSDILRVNTEITKAPLSASMIKRYDEHHQDLTLLKALVRQQLPEKYKEIFFDQSKNGYAGYIDGGASQEEFYKFIKPILEKMDGTEELLVKLNREDLLRKQRTFDNGSIPHQIHLGELHAILRRQEDFYPFLKDNREKIEKILTFRIPYYVGPLARGNSRFAWMTRKSEETITPWNFEEVVDKGASAQSFIERMTNFDKNLPNEKVLPKHSLLYEYFTVYNELTKVKYVTEGMRKPAFLSGEQKKAIVDLLFKTNRKVTVKQLKEDYFKKIECFDSVEISGVEDRFNASLGTYHDLLKIIKDKDFLDNEENEDILEDIVLTLTLFEDREMIEERLKTYAHLFDDKVMKQLKRRRYTGWGRLSRKLINGIRDKQSGKTILDFLKSDGFANRNFMQLIHDDSLTFKEDIQKAQVSGQGDSLHEHIANLAGSPAIKKGILQTVKVVDELVKVMGRHKPENIVIEMARENQTTQKGQKNSRERMKRIEEGIKELGSQILKEHPVENTQLQNEKLYLYYLQNGRDMYVDQELDINRLSDYDVDHIVPQSFLKDDSIDNKVLTRSDKNRGKSDNVPSEEVVKKMKNYWRQLLNAKLITQRKFDNLTKAERGGLSELDKAGFIKRQLVETRQITKHVAQILDSRMNTKYDENDKLIREVKVITLKSKLVSDFRKDFQFYKVREINNYHHAHDAYLNAVVGTALIKKYPKLESEFVYGDYKVYDVRKMIAKSEQEGADKRTADGSEFESPKKKRKV

SEQ ID NO: 22 - DNA, 8811 bp, Artificial Sequence
  Description of Artificial Sequence: Synthetic polynucleotide
atatgccaagtacgccccctattgacgtcaatgacggtaaatggcccgcctggcattatgcccagtacatgaccttatgggactttcctacttggcagtacatctacgtattagtcatcgctattaccatggtgatgcggttttggcagtacatcaatgggcgtggatagcggtttgactcacggggatttccaagtctccaccccattgacgtcaatgggagtttgttttggcaccaaaatcaacgggactttccaaaatgtcgtaacaactccgccccattgacgcaaatgggcggtaggcgtgtacggtgggaggtctatataagcagagctggtttagtgaaccgtcagatccgctagagatccgcggccgctaatacgactcactatagggagagccgccaccatgaaacggacagccgacggaagcgagttcgagtcaccaaagaagaagcggaaagtctctgaagtcgagtttagccacgagtattggatgaggcacgcactgaccctggcaaagcgagcatgggatgaaagagaagtccccgtgggcgccgtgctggtgcacaacaatagagtgatcggagagggatggaacaggccaatcggccgccacgaccctaccgcacacgcagagatcatggcactgaggcagggaggcctggtcatgcagaattaccgcctgatcgatgccaccctgtatgtgacactggagccatgcgtgatgtgcgcaggagcaatgatccacagcaggatcggaagagtggtgttcggagcacgggacgccaagaccggcgcagcaggctccctgatggatgtgctgcaccaccccggcatgaaccaccgggtggagatcacagagggaatcctggcagacgagtgcgccgccctgctgagcgatttctttagaatgcggagacaggagatcaaggcccagaagaaggcacagagctccaccgactctggaggatctagcggaggatcctctggaagcgagacaccaggcacaagcgagtccgccacaccagagagctccggcggctcctccggaggatcctctgaggtggagttttcccacgagtactggatgagacatgccctgaccctggccaagagggcacgcgatgagagggaggtgcctgtgggagccgtgctggtgctgaacaatagagtgatcggcgagggctggaacagagccatcggcctgcacgacccaacagcccatgccgaaattatggccctgagacagggcggcctggtcatgcagaactacagactgattgacgccaccctgtacgtgacattcgagccttgcgtgatgtgcgccggcgccatgatccactctaggatcggccgcgtggtgtttggcgtgaggaacgcaaaaaccggcgccgcaggctccctgatggacgtgctgcactaccccggcatgaatcaccgcgtcgaaattaccgagggaatcctggcagatgaatgtgccgccctgctgtgctatttctttcggatgcctagacaggtgttcaatgctcagaagaaggcccagagctccaccgactccggaggatctagcggaggctcctctggctctgagacacctggcacaagcgagagcgcaacacctgaaagcagcgggggcagcagcggggggtcagacaagaagtacagcatcggcctggccatcggcaccaactctgtgggctgggccgtgatcaccgacgagtacaaggtgcccagcaagaaattcaaggtgctgggcaacaccgaccggcacagcatcaagaagaacctgatcggagccctgctgttcgacagcggcgaaacagccgaggccacccggctgaagagaaccgccagaagaagatacaccagacggaagaaccggatctgctatctgcaagagatcttcagcaacgagatggccaaggtggacgacagcttcttccacagactggaagagtccttcctggtggaagaggataagaagcacgagcggcaccccatcttcggcaacatcgtggacgaggtggcctaccacgagaagtaccccaccatctaccacctgagaaagaaactggtggacagcaccgacaaggccgacctgcggctgatctatctggccctggcccacatgatcaagttccggggccacttcctgatcgagggcgacctgaaccccgacaacagcgacgtggacaagctgttcatccagctggtgcagacctacaaccagctgttcgaggaaaaccccatcaacgccagcggcgtggacgccaaggccatcctgtctgccagactgagcaagagcagacggctggaaaatctgatcgcccagctgcccggcgagaagaagaatggcctgttcggaaacctgattgccctgagcctgggcctgacccccaacttcaagagcaacttcgacctggccgaggatgccaaactgcagctgagcaaggacacctacgacgacgacctggacaacctgctggcccagatcggcgaccagtacgccgacctgtttctggccgccaagaacctgtccgacgccatcctgctgagcgacatcctgagagtgaacaccgagatcaccaaggcccccctgagcgcctctatgatcaagagatacgacgagcaccaccaggacctgaccctgctgaaagctctcgtgcggcagcagctgcctgagaagtacaaagagattttcttcgaccagagcaagaacggctacgccggctacattgacggcggagccagccaggaagagttctacaagttcatcaagcccatcctggaaaagatggacggcaccgaggaactgctcgtgaagctgaacagagaggacctgctgcggaagcagcggaccttcgacaacggcagcatcccccaccagatccacctgggagagctgcacgccattctgcggcggcaggaagatttttacccattcctgaaggacaaccgggaaaagatcgagaagatcctgaccttccgcatcccctactacgtgggccctctggccaggggaaacagcagattcgcctggatgaccagaaagagcgaggaaaccatcaccccctggaacttcgaggaagtggtggacaagggcgcttccgcccagagcttcatcgagcggatgaccaacttcgataagaacctgcccaacgagaaggtgctgcccaagcacagcctgctgtacgagtacttcaccgtgtataacgagctgaccaaagtgaaatacgtgaccgagggaatgagaaagcccgccttcctgagcggcgagcagaaaaaggccatcgtggacctgctgttcaagaccaaccggaaagtgaccgtgaagcagctgaaagaggactacttcaagaaaatcgagtgcttcgactccgtggaaatctccggcgtggaagatcggttcaacgcctccctgggcacataccacgatctgctgaaaattatcaaggacaaggacttcctggacaatgaggaaaacgaggacattctggaagatatcgtgctgaccctgacactgtttgaggacagagagatgatcgaggaacggctgaaaacctatgcccacctgttcgacgacaaagtgatgaagcagctgaagcggcggagatacaccggctggggcaggctgagccggaagctgatcaacggcatccgggacaagcagtccggcaagacaatcctggatttcctgaagtccgacggcttcgccaacagaaacttcatgcagctgatccacgacgacagcctgacctttaaagaggacatccagaaagcccaggtgtccggccagggcgatagcctgcacgagcacattgccaatctggccggcagccccgccattaagaagggcatcctgcagacagtgaaggtggtggacgagctcgtgaaagtgatgggccggcacaagcccgagaacatcgtgatcgaaatggccagagagaaccagaccacccagaagggacagaagaacagccgcgagagaatgaagcggatcgaagagggcatcaaagagctgggcagccagatcctgaaagaacaccccgtggaaaacacccagctgcagaacgagaagctgtacctgtactacctgcagaatgggcgggatatgtacgtggaccaggaactggacatcaaccggctgtccgactacgatgtggaccatatcgtgcctcagagctttctgaaggacgactccatcgacaacaaggtgctgaccagaagcgacaagaaccggggcaagagcgacaacgtgccctccgaagaggtcgtgaagaagatgaagaactactggcggcagctgctgaacgccaagctgattacccagagaaagttcgacaatctgaccaaggccgagagaggcggcctgagcgaactggataaggccggcttcatcaagagacagctggtggaaacccggcagatcacaaagcacgtggcacagatcctggactcccggatgaacactaagtacgacgagaatgacaagctgatccgggaagtgaaagtgatcaccctgaagtccaagctggtgtccgatttccggaaggatttccagttttacaaagtgcgcgagatcaacaactaccaccacgcccacgacgcctacctgaacgccgtcgtgggaaccgccctgatcaaaaagtaccctaagctggaaagcgagttcgtgtacggcgactacaaggtgtacgacgtgcggaagatgatcgccaagagcgagcaggaaatcggcaaggctaccgccaagtacttcttctacagcaacatcatgaactttttcaagaccgagattaccctggccaacggcgagatccggaagcggcctctgatcgagacaaacggcgaaaccggggagatcgtgtgggataagggccgggattttgccaccgtgcggaaagtgctgagcatgccccaagtgaatatcgtgaaaaagaccgaggtgcagacaggcggcttcagcaaagagtctatcctgcccaagaggaacagcgataagctgatcgccagaaagaaggactgggaccctaagaagtacggcggcttcgacagccccaccgtggcctattctgtgctggtggtggccaaagtggaaaagggcaagtccaagaaactgaagagtgtgaaagagctgctggggatcaccatcatggaaagaagcagcttcgagaagaatcccatcgactttctggaagccaagggctacaaagaagtgaaaaaggacctgatcatcaagctgcctaagtactccctgttcgagctggaaaacggccggaagagaatgctggcctctgccggcgaactgcagaagggaaacgaactggccctgccctccaaatatgtgaacttcctgtacctggccagccactatgagaagctgaagggctcccccgaggataatgagcagaaacagctgtttgtggaacagcacaagcactacctggacgagatcatcgagcagatcagcgagttctccaagagagtgatcctggccgacgctaatctggacaaagtgctgtccgcctacaacaagcaccgggataagcccatcagagagcaggccgagaatatcatccacctgtttaccctgaccaatctgggagcccctgccgccttcaagtactttgacaccaccatcgaccggaagaggtacaccagcaccaaagaggtgctggacgccaccctgatccaccagagcatcaccggcctgtacgagacacggatcgacctgtctcagctgggaggtgactctggcggctcaaaaagaaccgccgacggcagcgaattcgagcccaagaagaagaggaaagtctaaccggtcatcatcaccatcaccattgagtttaaacccgctgatcagcctcgactgtgccttctagttgccagccatctgttgtttgcccctcccccgtgccttccttgaccctggaaggtgccactcccactgtcctttcctaataaaatgaggaaattgcatcgcattgtctgagtaggtgtcattctattctggggggtggggtggggcaggacagcaagggggaggattgggaagacaatagcaggcatgctggggatgcggtgggctctatggcttctgaggcggaaagaaccagctggggctcgataccgtcgacctctagctagagcttggcgtaatcatggtcatagctgtttcctgtgtgaaattgttatccgctcacaattccacacaacatacgagccggaagcataaagtgtaaagcctagggtgcctaatgagtgagctaactcacattaattgcgttgcgctcactgcccgctttccagtcgggaaacctgtcgtgccagctgcattaatgaatcggccaacgcgcggggagaggcggtttgcgtattgggcgctcttccgcttcctcgctcactgactcgctgcgctcggtcgttcggctgcggcgagcggtatcagctcactcaaaggcggtaatacggttatccacagaatcaggggataacgcaggaaagaacatgtgagcaaaaggccagcaaaaggccaggaaccgtaaaaaggccgcgttgctggcgtttttccataggctccgcccccctgacgagcatcacaaaaatcgacgctcaagtcagaggtggcgaaacccgacaggactataaagataccaggcgtttccccctggaagctccctcgtgcgctctcctgttccgaccctgccgcttaccggatacctgtccgcctttctcccttcgggaagcgtggcgctttctcatagctcacgctgtaggtatctcagttcggtgtaggtcgttcgctccaagctgggctgtgtgcacgaaccccccgttcagcccgaccgctgcgccttatccggtaactatcgtcttgagtccaacccggtaagacacgacttatcgccactggcagcagccactggtaacaggattagcagagcgaggtatgtaggcggtgctacagagttcttgaagtggtggcctaactacggctacactagaagaacagtatttggtatctgcgctctgctgaagccagttaccttcggaaaaagagttggtagctcttgatccggcaaacaaaccaccgctggtagcggtggtttttttgtttgcaagcagcagattacgcgcagaaaaaaaggatctcaagaagatcctttgatcttttctacggggtctgacactcagtggaacgaaaactcacgttaagggattttggtcatgagattatcaaaaaggatcttcacctagatccttttaaattaaaaatgaagttttaaatcaatctaaagtatatatgagtaaacttggtctgacagttaccaatgcttaatcagtgaggcacctatctcagcgatctgtctatttcgttcatccatagttgcctgactccccgtcgtgtagataactacgatacgggagggcttaccatctggccccagtgctgcaatgataccgcgagacccacgctcaccggctccagatttatcagcaataaaccagccagccggaagggccgagcgcagaagtggtcctgcaactttatccgcctccatccagtctattaattgttgccgggaagctagagtaagtagttcgccagttaatagtttgcgcaacgttgttgccattgctacaggcatcgtggtgtcacgctcgtcgtttggtatggcttcattcagctccggttcccaacgatcaaggcgagttacatgatcccccatgttgtgcaaaaaagcggttagctccttcggtcctccgatcgttgtcagaagtaagttggccgcagtgttatcactcatggttatggcagcactgcataattctcttactgtcatgccatccgtaagatgcttttctgtgactggtgagtactcaaccaagtcattctgagaatagtgtatgcggcgaccgagttgctcttgcccggcgtcaatacgggataataccgcgccacatagcagaactttaaaagtgctcatcattggaaaacgttcttcggggcgaaaactctcaaggatcttaccgctgttgagatccagttcgatgtaacccactcgtgcacccaactgatcttcagcatcttttactttcaccagcgtttctgggtgagcaaaaacaggaaggcaaaatgccgcaaaaaagggaataagggcgacacggaaatgttgaatactcatactcttcctttttcaatattattgaagcatttatcagggttattgtctcatgagcggatacatatttgaatgtatttagaaaaataaacaaataggggttccgcgcacatttccccgaaaagtgccacctgacgtcgacggatcgggagatcgatctcccgatcccctagggtcgactctcagtacaatctgctctgatgccgcatagttaagccagtatctgctccctgcttgtgtgttggaggtcgctgagtagtgcgcgagcaaaatttaagctacaacaaggcaaggcttgaccgacaattgcatgaagaatctgcttagggttaggcgttttgcgctgcttcgcgatgtacgggccagatatacgcgttgacattgattattgactagttattaatagtaatcaattacggggtcattagttcatagcccatatatggagttccgcgttacataacttacggtaaatggcccgcctggctgaccgcccaacgacccccgcccattgacgtcaataatgacgtatgttcccatagtaacgccaatagggactttccattgacgtcaatgggtggagtatttacggtaaactgcccacttggcagtacatcaagtgtatc

SEQ ID NO: 23 - protein, 1367 aa, Streptococcus pyogenes
MDKKYSIGLDIGTNSVGWAVITDDYKVPSKKFKVLGNTDRHSIKKNLIGALLFGSGETAEATRLKRTARRRYTRRKNRICYLQEIFSNEMAKVDDSFFHRLEESFLVEEDKKHERHPIFGNIVDEVAYHEKYPTIYHLRKKLADSTDKADLRLIYLALAHMIKFRGHFLIEGDLNPDNSDVDKLFIQLVQIYNQLFEENPINASRVDAKAILSARLSKSRRLENLIAQLPGEKRNGLFGNLIALSLGLTPNFKSNFDLAEDAKLQLSKDTYDDDLDNLLAQIGDQYADLFLAAKNLSDAILLSDILRVNSEITKAPLSASMIKRYDEHHQDLTLLKALVRQQLPEKYKEIFFDQSKNGYAGYIDGGASQEEFYKFIKPILEKMDGTEELLVKLNREDLLRKQRTFDNGSIPHQIHLGELHAILRRQEDFYPFLKDNREKIEKILTFRIPYYVGPLARGNSRFAWMTRKSEETITPWNFEEVVDKGASAQSFIERMTNFDKNLPNEKVLPKHSLLYEYFTVYNELTKVKYVTEGMRKPAFLSGEQKKAIVDLLFKTNRKVTVKQLKEDYFKKIECFDSVEISGVEDRFNASLGAYHDLLKIIKDKDFLDNEENEDILEDIVLTLTLFEDRGMIEERLKTYAHLFDDKVMKQLKRRRYTGWGRLSRKLINGIRDKQSGKTILDFLKSDGFANRNFMQLIHDDSLTFKEDIQKAQVSGQGHSLHEQIANLAGSPAIKKGILQTVKIVDELVKVMGHKPENIVIEMARENQTTQKGQKNSRERMKRIEEGIKELGSQILKEHPVENTQLQNEKLYLYYLQNGRDMYVDQELDINRLSDYDVDHIVPQSFIKDDSIDNKVLTRSDKNRGKSDNVPSEEVVKKMKNYWRQLLNAKLITQRKFDNLTKAERGGLSELDKAGFIKRQLVETRQITKHVAQILDSRMNTKYDENDKLIREVKVITLKSKLVSDFRKDFQFYKVREINNYHHAHDAYLNAVVGTALIKKYPKLESEFVYGDYKVYDVRKMIAKSEQEIGKATAKYFFYSNIMNFFKTEITLANGEIRKRPLIETNGETGEIVWDKGRDFATVRKVLSMPQVNIVKKTEVQTGGFSKESILPKRNSDKLIARKKDWDPKKYGGFDSPTVAYSVLVVAKVEKGKSKKLKSVKELLGITIMERSSFEKNPIDFLEAKGYKEVKKDLIIKLPKYSLFELENGRKRMLASAGELQKGNELALPSKYVNFLYLASHYEKLKGSPEDNEQKQLFVEQHKHYLDEIIEQISEFSKRVILADANLDKVLSAYNKHRDKPIREQAENIIHLFTLTNLGAPAAFKYFDTTIDRKRYTSTKEVLDATLIHQSITGLYETRIDLSQLGGD

SEQ ID NO: 24 - DNA, 4104 bp, Streptococcus pyogenes
atggataagaaatactcaataggcttagatatcggcacaaatagcgtcggatgggcggtgatcactgatgattataaggttccgtctaaaaagttcaaggttctgggaaatacagaccgccacagtatcaaaaaaaatcttataggggctcttttatttggcagtggagagacagcggaagcgactcgtctcaaacggacagctcgtagaaggtatacacgtcggaagaatcgtatttgttatctacaggagattttttcaaatgagatggcgaaagtagatgatagtttctttcatcgacttgaagagtcttttttggtggaagaagacaagaagcatgaacgtcatcctatttttggaaatatagtagatgaagttgcttatcatgagaaatatccaactatctatcatctgcgaaaaaaattggcagattctactgataaagcggatttgcgcttaatctatttggccttagcgcatatgattaagtttcgtggtcattttttgattgagggagatttaaatcctgataatagtgatgtggacaaactatttatccagttggtacaaatctacaatcaattatttgaagaaaaccctattaacgcaagtagagtagatgctaaagcgattctttctgcacgattgagtaaatcaagacgattagaaaatctcattgctcagctccccggtgagaagagaaatggcttgtttgggaatctcattgctttgtcattgggattgacccctaattttaaatcaaattttgatttggcagaagatgctaaattacagctttcaaaagatacttacgatgatgatttagataatttattggcgcaaattggagatcaatatgctgatttgtttttggcagctaagaatttatcagatgctattttactttcagatatcctaagagtaaatagtgaaataactaaggctcccctatcagcttcaatgattaagcgctacgatgaacatcatcaagacttgactcttttaaaagctttagttcgacaacaacttccagaaaagtataaagaaatcttttttgatcaatcaaaaaacggatatgcaggttatattgatgggggagctagccaagaagaattttataaatttatcaaaccaattttagaaaaaatggatggtactgaggaattattggtgaaactaaatcgtgaagatttgctgcgcaagcaacggacctttgacaacggctctattccccatcaaattcacttgggtgagctgcatgctattttgagaagacaagaagacttttatccatttttaaaagacaatcgtgagaagattgaaaaaatcttgacttttcgaattccttattatgttggtccattggcgcgtggcaatagtcgttttgcatggatgactcggaagtctgaagaaacaattaccccatggaattttgaagaagttgtcgataaaggtgcttcagctcaatcatttattgaacgcatgacaaactttgataaaaatcttccaaatgaaaaagtactaccaaaacatagtttgctttatgagtattttacggtttataacgaattgacaaaggtcaaatatgttactgagggaatgcgaaaaccagcatttctttcaggtgaacagaagaaagccattgttgatttactcttcaaaacaaatcgaaaagtaaccgttaagcaattaaaagaagattatttcaaaaaaatagaatgttttgatagtgttgaaatttcaggagttgaagatagatttaatgcttcattaggcgcctaccatgatttgctaaaaattattaaagataaagattttttggataatgaagaaaatgaagatatcttagaggatattgttttaacattgaccttatttgaagatagggggatgattgaggaaagacttaaaacatatgctcacctctttgatgataaggtgatgaaacagcttaaacgtcgccgttatactggttggggacgtttgtctcgaaaattgattaatggtattagggataagcaatctggcaaaacaatattagattttttgaaatcagatggttttgccaatcgcaattttatgcagctgatccatgatgatagtttgacatttaaagaagatattcaaaaagcacaggtgtctggacaaggccatagtttacatgaacagattgctaacttagctggcagtcctgctattaaaaaaggtattttacagactgtaaaaattgttgatgaactggtcaaagtaatggggcataagccagaaaatatcgttattgaaatggcacgtgaaaatcagacaactcaaaagggccagaaaaattcgcgagagcgtatgaaacgaatcgaagaaggtatcaaagaattaggaagtcagattcttaaagagcatcctgttgaaaatactcaattgcaaaatgaaaagctctatctctattatctacaaaatggaagagacatgtatgtggaccaagaattagatattaatcgtttaagtgattatgatgtcgatcacattgttccacaaagtttcattaaagacgattcaatagacaataaggtactaacgcgttctgataaaaatcgtggtaaatcggataacgttccaagtgaagaagtagtcaaaaagatgaaaaactattggagacaacttctaaacgccaagttaatcactcaacgtaagtttgataatttaacgaaagctgaacgtggaggtttgagtgaacttgataaagctggttttatcaaacgccaattggttgaaactcgccaaatcactaagcatgtggcacaaattttggatagtcgcatgaatactaaatacgatgaaaatgataaacttattcgagaggttaaagtgattaccttaaaatctaaattagtttctgacttccgaaaagatttccaattctataaagtacgtgagattaacaattaccatcatgcccatgatgcgtatctaaatgccgtcgttggaactgctttgattaagaaatatccaaaacttgaatcggagtttgtctatggtgattataaagtttatgatgttcgtaaaatgattgctaagtctgagcaagaaataggcaaagcaaccgcaaaatatttcttttactctaatatcatgaacttcttcaaaacagaaattacacttgcaaatggagagattcgcaaacgccctctaatcgaaactaatggggaaactggagaaattgtctgggataaagggcgagattttgccacagtgcgcaaagtattgtccatgccccaagtcaatattgtcaagaaaacagaagtacagacaggcggattctccaaggagtcaattttaccaaaaagaaattcggacaagcttattgctcgtaaaaaagactgggatccaaaaaaatatggtggttttgatagtccaacggtagcttattcagtcctagtggttgctaaggtggaaaaagggaaatcgaagaagttaaaatccgttaaagagttactagggatcacaattatggaaagaagttcctttgaaaaaaatccgattgactttttagaagctaaaggatataaggaagttaaaaaagacttaatcattaaactacctaaatatagtctttttgagttagaaaacggtcgtaaacggatgctggctagtgccggagaattacaaaaaggaaatgagctggctctgccaagcaaatatgtgaattttttatatttagctagtcattatgaaaagttgaagggtagtccagaagataacgaacaaaaacaattgtttgtggagcagcataagcattatttagatgagattattgagcaaatcagtgaattttctaagcgtgttattttagcagatgccaatttagataaagttcttagtgcatataacaaacatagagacaaaccaatacgtgaacaagcagaaaatattattcatttatttacgttgacgaatcttggagctcccgctgcttttaaatattttgatacaacaattgatcgtaaacgatatacgtctacaaaagaagttttagatgccactcttatccatcaatccatcactggtctttatgaaacacgcattgatttgagtcagctaggaggtgactga

SEQ ID NO: 25 - DNA, 4212 bp, Streptococcus pyogenes
atggataaaaagtattctattggtttagacatcggcactaattccgttggatgggctgtcataaccgatgaatacaaagtaccttcaaagaaatttaaggtgttggggaacacagaccgtcattcgattaaaaagaatcttatcggtgccctcctattcgatagtggcgaaacggcagaggcgactcgcctgaaacgaaccgctcggagaaggtatacacgtcgcaagaaccgaatatgttacttacaagaaatttttagcaatgagatggccaaagttgacgattctttctttcaccgtttggaagagtccttccttgtcgaagaggacaagaaacatgaacggcaccccatctttggaaacatagtagatgaggtggcatatcatgaaaagtacccaacgatttatcacctcagaaaaaagctagttgactcaactgataaagcggacctgaggttaatctacttggctcttgcccatatgataaagttccgtgggcactttctcattgagggtgatctaaatccggacaactcggatgtcgacaaactgttcatccagttagtacaaacctataatcagttgtttgaagagaaccctataaatgcaagtggcgtggatgcgaaggctattcttagcgcccgcctctctaaatcccgacggctagaaaacctgatcgcacaattacccggagagaagaaaaatgggttgttcggtaaccttatagcgctctcactaggcctgacaccaaattttaagtcgaacttcgacttagctgaagatgccaaattgcagcttagtaaggacacgtacgatgacgatctcgacaatctactggcacaaattggagatcagtatgcggacttatttttggctgccaaaaaccttagcgatgcaatcctcctatctgacatactgagagttaatactgagattaccaaggcgccgttatccgcttcaatgatcaaaaggtacgatgaacatcaccaagacttgacacttctcaaggccctagtccgtcagcaactgcctgagaaatataaggaaatattctttgatcagtcgaaaaacgggtacgcaggttatattgacggcggagcgagtcaagaggaattctacaagtttatcaaacccatattagagaagatggatgggacggaagagttgcttgtaaaactcaatcgcgaagatctactgcgaaagcagcggactttcgacaacggtagcattccacatcaaatccacttaggcgaattgcatgctatacttagaaggcaggaggatttttatccgttcctcaaagacaatcgtgaaaagattgagaaaatcctaacctttcgcataccttactatgtgggacccctggcccgagggaactctcggttcgcatggatgacaagaaagtccgaagaaacgattactccatggaattttgaggaagttgtcgataaaggtgcgtcagctcaatcgttcatcgagaggatgaccaactttgacaagaatttaccgaacgaaaaagtattgcctaagcacagtttactttacgagtatttcacagtgtacaatgaactcacgaaagttaagtatgtcactgagggcatgcgtaaacccgcctttctaagcggagaacagaagaaagcaatagtagatctgttattcaagaccaaccgcaaagtgacagttaagcaattgaaagaggactactttaagaaaattgaatgcttcgattctgtcgagatctccggggtagaagatcgatttaatgcgtcacttggtacgtatcatgacctcctaaagataattaaagataaggacttcctggataacgaagagaatgaagatatcttagaagatatagtgttgactcttaccctctttgaagatcgggaaatgattgaggaaagactaaaaacatacgctcacctgttcgacgataaggttatgaaacagttaaagaggcgtcgctatacgggctggggacgattgtcgcggaaacttatcaacgggataagagacaagcaaagtggtaaaactattctcgattttctaaagagcgacggcttcgccaataggaactttatgcagctgatccatgatgactctttaaccttcaaagaggatatacaaaaggcacaggtttccggacaaggggactcattgcacgaacatattgcgaatcttgctggttcgccagccatcaaaaagggcatactccagacagtcaaagtagtggatgagctagttaaggtcatgggacgtcacaaaccggaaaacattgtaatcgagatggcacgcgaaaatcaaacgactcagaaggggcaaaaaaacagtcgagagcggatgaagagaatagaagagggtattaaagaactgggcagccagatcttaaaggagcatcctgtggaaaatacccaattgcagaacgagaaactttacctctattacctacaaaatggaagggacatgtatgttgatcaggaactggacataaaccgtttatctgattacgacgtcgatcacattgtaccccaatcctttttgaaggacgattcaatcgacaataaagtgcttacacgctcggataagaaccgagggaaaagtgacaatgttccaagcgaggaagtcgtaaagaaaatgaagaactattggcggcagctcctaaatgcgaaactgataacgcaaagaaagttcgataacttaactaaagctgagaggggtggcttgtctgaacttgacaaggccggatttattaaacgtcagctcgtggaaacccgccaaatcacaaagcatgttgcacagatactagattcccgaatgaatacgaaatacgacgagaacgataagctgattcgggaagtcaaagtaatcactttaaagtcaaaattggtgtcggacttcagaaaggattttcaattctataaagttagggagataaataactaccaccatgcgcacgacgcttatcttaatgccgtcgtagggaccgcactcattaagaaatacccgaagctagaaagtgagtttgtgtatggtgattacaaagtttatgacgtccgtaagatgatcgcgaaaagcgaacaggagataggcaaggctacagccaaatacttcttttattctaacattatgaatttctttaagacggaaatcactctggcaaacggagagatacgcaaacgacctttaattgaaaccaatggggagacaggtgaaatcgtatgggataagggccgggacttcgcgacggtgagaaaagttttgtccatgccccaagtcaacatagtaaagaaaactgaggtgcagaccggagggttttcaaaggaatcgattcttccaaaaaggaatagtgataagctcatcgctcgtaaaaaggactgggacccgaaaaagtacggtggcttcgatagccctacagttgcctattctgtcctagtagtggcaaaagttgagaagggaaaatccaagaaactgaagtcagtcaaagaattattggggataacgattatggagcgctcgtcttttgaaaagaaccccatcgacttccttgaggcgaaaggttacaaggaagtaaaaaaggatctcataattaaactaccaaagtatagtctgtttgagttagaaaatggccgaaaacggatgttggctagcgccggagagcttcaaaaggggaacgaactcgcactaccgtctaaatacgtgaatttcctgtatttagcgtcccattacgagaagttgaaaggttcacctgaagataacgaacagaagcaactttttgttgagcagcacaaacattatctcgacgaaatcatagagcaaatttcggaattcagtaagagagtcatcctagctgatgccaatctggacaaagtattaagcgcatacaacaagcacagggataaacccatacgtgagcaggcggaaaatattatccatttgtttactcttaccaacctcggcgctccagccgcattcaagtattttgacacaacgatagatcgcaaacgatacacttctaccaaggaggtgctagacgcgacactgattcaccaatccatcacgggattatatgaaactcggatagatttgtcacagcttgggggtgacggatcccccaagaagaagaggaaagtctcgagcgactacaaagaccatgacggtgattataaagatcatgacatcgattacaaggatgacgatgacaaggctgcagga

SEQ ID NO: 26 - protein, 1368 aa, Streptococcus pyogenes
MDKKYSIGLAIGTNSVGWAVITDEYKVPSKKFKVLGNTDRHSIKKNLIGALLFDSGETAEATRLKRTARRRYTRRKNRICYLQEIFSNEMAKVDDSFFHRLEESFLVEEDKKHERHPIFGNIVDEVAYHEKYPTIYHLRKKLVDSTDKADLRLIYLALAHMIKFRGHFLIEGDLNPDNSDVDKLFIQLVQTYNQLFEENPINASGVDAKAILSARLSKSRRLENLIAQLPGEKKNGLFGNLIALSLGLTPNFKSNFDLAEDAKLQLSKDTYDDDLDNLLAQIGDQYADLFLAAKNLSDAILLSDILRVNTEITKAPLSASMIKRYDEHHQDLTLLKALVRQQLPEKYKEIFFDQSKNGYAGYIDGGASQEEFYKFIKPILEKMDGTEELLVKLNREDLLRKQRTFDNGSIPHQIHLGELHAILRRQEDFYPFLKDNREKIEKILTFRIPYYVGPLARGNSRFAWMTRKSEETITPWNFEEVVDKGASAQSFIERMTNFDKNLPNEKVLPKHSLLYEYFTVYNELTKVKYVTEGMRKPAFLSGEQKKAIVDLLFKTNRKVTVKQLKEDYFKKIECFDSVEISGVEDRFNASLGTYHDLLKIIKDKDFLDNEENEDILEDIVLTLTLFEDREMIEERLKTYAHLFDDKVMKQLKRRRYTGWGRLSRKLINGIRDKQSGKTILDFLKSDGFANRNFMQLIHDDSLTFKEDIQKAQVSGQGDSLHEHIANLAGSPAIKKGILQTVKVVDELVKVMGRHKPENIVIEMARENQTTQKGQKNSRERMKRIEEGIKELGSQILKEHPVENTQLQNEKLYLYYLQNGRDMYVDQELDINRLSDYDVDHIVPQSFLKDDSIDNKVLTRSDKNRGKSDNVPSEEVVKKMKNYWRQLLNAKLITQRKFDNLTKAERGGLSELDKAGFIKRQLVETRQITKHVAQILDSRMNTKYDENDKLIREVKVITLKSKLVSDFRKDFQFYKVREINNYHHAHDAYLNAVVGTALIKKYPKLESEFVYGDYKVYDVRKMIAKSEQEIGKATAKYFFYSNIMNFFKTEITLANGEIRKRPLIETNGETGEIVWDKGRDFATVRKVLSMPQVNIVKKTEVQTGGFSKESILPKRNSDKLIARKKDWDPKKYGGFDSPTVAYSVLVVAKVEKGKSKKLKSVKELLGITIMERSSFEKNPIDFLEAKGYKEVKKDLIIKLPKYSLFELENGRKRMLASAGELQKGNELALPSKYVNFLYLASHYEKLKGSPEDNEQKQLFVEQHKHYLDEIIEQISEFSKRVILADANLDKVLSAYNKHRDKPIREQAENIIHLFTLTNLGAPAAFKYFDTTIDRKRYTSTKEVLDATLIHQSITGLYETRIDLSQLGGD

SEQ ID NO: 27 - DNA, 4107 bp, Streptococcus pyogenes
atggataagaaatactcaataggcttagatatcggcacaaatagcgtcggatgggcggtgatcactgatgaatataaggttccgtctaaaaagttcaaggttctgggaaatacagaccgccacagtatcaaaaaaaatcttataggggctcttttatttgacagtggagagacagcggaagcgactcgtctcaaacggacagctcgtagaaggtatacacgtcggaagaatcgtatttgttatctacaggagattttttcaaatgagatggcgaaagtagatgatagtttctttcatcgacttgaagagtcttttttggtggaagaagacaagaagcatgaacgtcatcctatttttggaaatatagtagatgaagttgcttatcatgagaaatatccaactatctatcatctgcgaaaaaaattggtagattctactgataaagcggatttgcgcttaatctatttggccttagcgcatatgattaagtttcgtggtcattttttgattgagggagatttaaatcctgataatagtgatgtggacaaactatttatccagttggtacaaacctacaatcaattatttgaagaaaaccctattaacgcaagtggagtagatgctaaagcgattctttctgcacgattgagtaaatcaagacgattagaaaatctcattgctcagctccccggtgagaagaaaaatggcttatttgggaatctcattgctttgtcattgggtttgacccctaattttaaatcaaattttgatttggcagaagatgctaaattacagctttcaaaagatacttacgatgatgatttagataatttattggcgcaaattggagatcaatatgctgatttgtttttggcagctaagaatttatcagatgctattttactttcagatatcctaagagtaaatactgaaataactaaggctcccctatcagcttcaatgattaaacgctacgatgaacatcatcaagacttgactcttttaaaagctttagttcgacaacaacttccagaaaagtataaagaaatcttttttgatcaatcaaaaaacggatatgcaggttatattgatgggggagctagccaagaagaattttataaatttatcaaaccaattttagaaaaaatggatggtactgaggaattattggtgaaactaaatcgtgaagatttgctgcgcaagcaacggacctttgacaacggctctattccccatcaaattcacttgggtgagctgcatgctattttgagaagacaagaagacttttatccatttttaaaagacaatcgtgagaagattgaaaaaatcttgacttttcgaattccttattatgttggtccattggcgcgtggcaatagtcgttttgcatggatgactcggaagtctgaagaaacaattaccccatggaattttgaagaagttgtcgataaaggtgcttcagctcaatcatttattgaacgcatgacaaactttgataaaaatcttccaaatgaaaaagtactaccaaaacatagtttgctttatgagtattttacggtttataacgaattgacaaaggtcaaatatgttactgaaggaatgcgaaaaccagcatttctttcaggtgaacagaagaaagccattgttgatttactcttcaaaacaaatcgaaaagtaaccgttaagcaattaaaagaagattatttcaaaaaaatagaatgttttgatagtgttgaaatttcaggagttgaagatagatttaatgcttcattaggtacctaccatgatttgctaaaaattattaaagataaagattttttggataatgaagaaaatgaagatatcttagaggatattgttttaacattgaccttatttgaagatagggagatgattgaggaaagacttaaaacatatgctcacctctttgatgataaggtgatgaaacagcttaaacgtcgccgttatactggttggggacgtttgtctcgaaaattgattaatggtattagggataagcaatctggcaaaacaatattagattttttgaaatcagatggttttgccaatcgcaattttatgcagctgatccatgatgatagtttgacatttaaagaagacattcaaaaagcacaagtgtctggacaaggcgatagtttacatgaacatattgcaaatttagctggtagccctgctattaaaaaaggtattttacagactgtaaaagttgttgatgaattggtcaaagtaatggggcggcataagccagaaaatatcgttattgaaatggcacgtgaaaatcagacaactcaaaagggccagaaaaattcgcgagagcgtatgaaacgaatcgaagaaggtatcaaagaattaggaagtcagattcttaaagagcatcctgttgaaaatactcaattgcaaaatgaaaagctctatctctattatctccaaaatggaagagacatgtatgtggaccaagaattagatattaatcgtttaagtgattatgatgtcgatcacattgttccacaaagtttccttaaagacgattcaatagacaataaggtcttaacgcgttctgataaaaatcgtggtaaatcggataacgttccaagtgaagaagtagtcaaaaagatgaaaaactattggagacaacttctaaacgccaagttaatcactcaacgtaagtttgataatttaacgaaagctgaacgtggaggtttgagtgaacttgataaagctggttttatcaaacgccaattggttgaaactcgccaaatcactaagcatgtggcacaaattttggatagtcgcatgaatactaaatacgatgaaaatgataaacttattcgagaggttaaagtgattaccttaaaatctaaattagtttctgacttccgaaaagatttccaattctataaagtacgtgagattaacaattaccatcatgcccatgatgcgtatctaaatgccgtcgttggaactgctttgattaagaaatatccaaaacttgaatcggagtttgtctatggtgattataaagtttatgatgttcgtaaaatgattgctaagtctgagcaagaaataggcaaagcaaccgcaaaatatttcttttactctaatatcatgaacttcttcaaaacagaaattacacttgcaaatggagagattcgcaaacgccctctaatcgaaactaatggggaaactggagaaattgtctgggataaagggcgagattttgccacagtgcgcaaagtattgtccatgccccaagtcaatattgtcaagaaaacagaagtacagacaggcggattctccaaggagtcaattttaccaaaaagaaattcggacaagcttattgctcgtaaaaaagactgggatccaaaaaaatatggtggttttgatagtccaacggtagcttattcagtcctagtggttgctaaggtggaaaaagggaaatcgaagaagttaaaatccgttaaagagttactagggatcacaattatggaaagaagttcctttgaaaaaaatccgattgactttttagaagctaaaggatataaggaagttaaaaaagacttaatcattaaactacctaaatatagtctttttgagttagaaaacggtcgtaaacggatgctggctagtgccggagaattacaaaaaggaaatgagctggctctgccaagcaaatatgtgaattttttatatttagctagtcattatgaaaagttgaagggtagtccagaagataacgaacaaaaacaattgtttgtggagcagcataagcattatttagatgagattattgagcaaatcagtgaattttctaagcgtgttattttagcagatgccaatttagataaagttcttagtgcatataacaaacatagagacaaaccaatacgtgaacaagcagaaaatattattcatttatttacgttgacgaatcttggagctcccgctgcttttaaatattttgatacaacaattgatcgtaaacgatatacgtctacaaaagaagttttagatgccactcttatccatcaatccatcactggtctttatgaaacacgcattgatttgagtcagctaggaggtgactga

SEQ ID NO: 28 - protein, 1368 aa, Streptococcus pyogenes [sequence omitted]

SEQ ID NO: 29 - protein, 1082 aa, Neisseria meningitidis
MAAFKPNPINYILGLDIGIASVGWAMVEIDEDENPICLIDLGVRVFERAEVPKTGDSLAMARRLARSVRRLTRRRAHRLLRARRLLKREGVLQAADFDENGLIKSLPNTPWQLRAAALDRKLTPLEWSAVLLHLIKHRGYLSQRKNEGETADKELGALLKGVADNAHALQTGDFRTPAELALNKFEKESGHIRNQRGDYSHTFSRKDLQAELILLFEKQKEFGNPHVSGGLKEGIETLLMTQRPALSGDAVQKMLGHCTFEPAEPKAAKNTYTAERFIWLTKLNNLRILEQGSERPLTDTERATLMDEPYRKSKLTYAQARKLLGLEDTAFFKGLRYGKDNAEASTLMEMKAYHAISRALEKEGLKDKKSPLNLSPELQDEIGTAFSLFKTDEDITGRLKDRIQPEILEALLKHISFDKFVQISLKALRRIVPLMEQGKRYDEACAEIYGDHYGKKNTEEKIYLPPIPADEIRNPVVLRALSQARKVINGVVRRYGSPARIHIETAREVGKSFKDRKEIEKRQEENRKDREKAAAKFREYFPNFVGEPKSKDILKLRLYEQQHGKCLYSGKEINLGRLNEKGYVEIDHALPFSRTWDDSFNNKVLVLGSENQNKGNQTPYEYFNGKDNSREWQEFKARVETSRFPRSKKQRILLQKFDEDGFKERNLNDTRYVNRFLCQFVADRMRLTGKGKKRVFASNGQITNLLRGFWGLRKVRAENDRHHALDAVVVACSTVAMQQKITRFVRYKEMNAFDGKTIDKETGEVLHQKTHFPQPWEFFAQEVMIRVFGKPDGKPEFEEADTPEKLRTLLAEKLSSRPEAVHEYVTPLFVSRAPNRKMSGQGHMETVKSAKRLDEGVSVLRVPLTQLKLKDLEKMVNREREPKLYEALKARLEAHKDDPAKAFAEPFYKYDKAGNRTQQVKAVRVEQVQKTGVWVRNHNGIADNATMVRVDVFEKGDKYYLVPIYSWQVAKGILPDRAVVQGKDEEDWQLIDDSFNFKFSLHPNDLVEVITKKARMFGYFASCHRGTGNINIRIHDLDHKIGKNGILEGIGVKTALSFQKYQIDELGKEIRPCRLKKRPPVR

SEQ ID NO: 30 - protein, 1082 aa, Neisseria meningitidis
MAAFKPNPINYILGLDIGIASVGWAMVEIDEEENPIRLIDLGVRVFERAEVPKTGDSLAMARRLARSVRRLTRRRAHRLLRARRLLKREGVLQAADFDENGLIKSLPNTPWQLRAAALDRKLTPLEWSAVLLHLIKHRGYLSQRKNEGETADKELGALLKGVANNAHALQTGDFRTPAELALNKFEKESGHIRNQRGDYSHTFSRKDLQAELILLFEKQKEFGNPHVSGGLKEGIETLLMTQRPALSGDAVQKMLGHCTFEPAEPKAAKNTYTAERFIWLTKLNNLRILEQGSERPLTDTERATLMDEPYRKSKLTYAQARKLLGLEDTAFFKGLRYGKDNAEASTLMEMKAYHAISRALEKEGLKDKKSPLNLSSELQDEIGTAFSLFKTDEDITGRLKDRVQPEILEALLKHISFDKFVQISLKALRRIVPLMEQGKRYDEACAEIYGDHYGKKNTEEKIYLPPIPADEIRNPVVLRALSQARKVINGVVRRYGSPARIHIETAREVGKSFKDRKEIEKRQEENRKDREKAAAKFREYFPNFVGEPKSKDILKLRLYEQQHGKCLYSGKEINLVRLNEKGYVEIDHALPFSRTWDDSFNNKVLVLGSENQNKGNQTPYEYFNGKDNSREWQEFKARVETSRFPRSKKQRILLQKFDEDGFKECNLNDTRYVNRFLCQFVADHILLTGKGKRRVFASNGQITNLLRGFWGLRKVRAENDRHHALDAVVVACSTVAMQQKITRFVRYKEMNAFDGKTIDKETGKVLHQKTHFPQPWEFFAQEVMIRVFGKPDGKPEFEEADTPEKLRTLLAEKLSSRPEAVHEYVTPLFVSRAPNRKMSGAHKDTLRSAKRFVKHNEKISVKRVWLTEIKLADLENMVNYKNGREIELYEALKARLEAYGGNAKQAFDPKDNPFYKKGGQLVKAVRVEKTQESGVLLNKKNAYTIADNGDMVRVDVFCKVDKKGKNQYFIVPIYAWQVAENILPDIDCKGYRIDDSYTFCFSLHKYDLIAFQKDEKSKVEFAYYINCDSSNGRFYLAWHDKGSKEQQFRISTQNLVLIQKYQVNELGKEIRPCRLKKRPPVR

SEQ ID NO: 31 - protein, 1368 aa, Artificial Sequence
  Description of Artificial Sequence: Synthetic polypeptide
MDKKYSIGLAIGTNSVGWAVITDEYKVPSKKFKVLGNTDRHSIKKNLIGALLFDSGETAEATRLKRTARRRYTRRKNRICYLQEIFSNEMAKVDDSFFHRLEESFLVEEDKKHERHPIFGNIVDEVAYHEKYPTIYHLRKKLVDSTDKADLRLIYLALAHMIKFRGHFLIEGDLNPDNSDVDKLFIQLVQTYNQLFEENPINASGVDAKAILSARLSKSRRLENLIAQLPGEKKNGLFGNLIALSLGLTPNFKSNFDLAEDAKLQLSKDTYDDDLDNLLAQIGDQYADLFLAAKNLSDAILLSDILRVNTEITKAPLSASMIKRYDEHHQDLTLLKALVRQQLPEKYKEIFFDQSKNGYAGYIDGGASQEEFYKFIKPILEKMDGTEELLVKLNREDLLRKQRTFDNGSIPHQIHLGELHAILRRQEDFYPFLKDNREKIEKILTFRIPYYVGPLARGNSRFAWMTRKSEETITPWNFEEVVDKGASAQSFIERMTNFDKNLPNEKVLPKHSLLYEYFTVYNELTKVKYVTEGMRKPAFLSGEQKKAIVDLLFKTNRKVTVKQLKEDYFKKIECFDSVEISGVEDRFNASLGTYHDLLKIIKDKDFLDNEENEDILEDIVLTLTLFEDREMIEERLKTYAHLFDDKVMKQLKRRRYTGWGRLSRKLINGIRDKQSGKTILDFLKSDGFANRNFMQLIHDDSLTFKEDIQKAQVSGQGDSLHEHIANLAGSPAIKKGILQTVKVVDELVKVMGRHKPENIVIEMARENQTTQKGQKNSRERMKRIEEGIKELGSQILKEHPVENTQLQNEKLYLYYLQNGRDMYVDQELDINRLSDYDVDAIVPQSFLKDDSIDNKVLTRSDKNRGKSDNVPSEEVVKKMKNYWRQLLNAKLITQRKFDNLTKAERGGLSELDKAGFIKRQLVETRQITKHVAQILDSRMNTKYDENDKLIREVKVITLKSKLVSDFRKDFQFYKVREINNYHHAHDAYLNAVVGTALIKKYPKLESEFVYGDYKVYDVRKMIAKSEQEIGKATAKYFFYSNIMNFFKTEITLANGEIRKRPLIETNGETGEIVWDKGRDFATVRKVLSMPQVNIVKKTEVQTGGFSKESILPKRNSDKLIARKKDWDPKKYGGFDSPTVAYSVLVVAKVEKGKSKKLKSVKELLGITIMERSSFEKNPIDFLEAKGYKEVKKDLIIKLPKYSLFELENGRKRMLASAGELQKGNELALPSKYVNFLYLASHYEKLKGSPEDNEQKQLFVEQHKHYLDEIIEQISEFSKRVILADANLDKVLSAYNKHRDKPIREQAENIIHLFTLTNLGAPAAFKYFDTTIDRKRYTSTKEVLDATLIHQSITGLYETRIDLSQLGGD

SEQ ID NO: 32 - protein, 1367 aa, Artificial Sequence
  Description of Artificial Sequence: Synthetic polypeptide
DKKYSIGLAIGTNSVGWAVITDEYKVPSKKFKVLGNTDRHSIKKNLIGALLFDSGETAEATRLKRTARRRYTRRKNRICYLQEIFSNEMAKVDDSFFHRLEESFLVEEDKKHERHPIFGNIVDEVAYHEKYPTIYHLRKKLVDSTDKADLRLIYLALAHMIKFRGHFLIEGDLNPDNSDVDKLFIQLVQTYNQLFEENPINASGVDAKAILSARLSKSRRLENLIAQLPGEKKNGLFGNLIALSLGLTPNFKSNFDLAEDAKLQLSKDTYDDDLDNLLAQIGDQYADLFLAAKNLSDAILLSDILRVNTEITKAPLSASMIKRYDEHHQDLTLLKALVRQQLPEKYKEIFFDQSKNGYAGYIDGGASQEEFYKFIKPILEKMDGTEELLVKLNREDLLRKQRTFDNGSIPHQIHLGELHAILRRQEDFYPFLKDNREKIEKILTFRIPYYVGPLARGNSRFAWMTRKSEETITPWNFEEVVDKGASAQSFIERMTNFDKNLPNEKVLPKHSLLYEYFTVYNELTKVKYVTEGMRKPAFLSGEQKKAIVDLLFKTNRKVTVKQLKEDYFKKIECFDSVEISGVEDRFNASLGTYHDLLKIIKDKDFLDNEENEDILEDIVLTLTLFEDREMIEERLKTYAHLFDDKVMKQLKRRRYTGWGRLSRKLINGIRDKQSGKTILDFLKSDGFANRNFMQLIHDDSLTFKEDIQKAQVSGQGDSLHEHIANLAGSPAIKKGILQTVKVVDELVKVMGRHKPENIVIEMARENQTTQKGQKNSRERMKRIEEGIKELGSQILKEHPVENTQLQNEKLYLYYLQNGRDMYVDQELDINRLSDYDVDAIVPQSFLKDDSIDNKVLTRSDKNRGKSDNVPSEEVVKKMKNYWRQLLNAKLITQRKFDNLTKAERGGLSELDKAGFIKRQLVETRQITKHVAQILDSRMNTKYDENDKLIREVKVITLKSKLVSDFRKDFQFYKVREINNYHHAHDAYLNAVVGTALIKKYPKLESEFVYGDYKVYDVRKMIAKSEQEIGKATAKYFFYSNIMNFFKTEITLANGEIRKRPLIETNGETGEIVWDKGRDFATVRKVLSMPQVNIVKKTEVQTGGFSKESILPKRNSDKLIARKKDWDPKKYGGFDSPTVAYSVLVVAKVEKGKSKKLKSVKELLGITIMERSSFEKNPIDFLEAKGYKEVKKDLIIKLPKYSLFELENGRKRMLASAGELQKGNELALPSKYVNFLYLASHYEKLKGSPEDNEQKQLFVEQHKHYLDEIIEQISEFSKRVILADANLDKVLSAYNKHRDKPIREQAENIIHLFTLTNLGAPAAFKYFDTTIDRKRYTSTKEVLDATLIHQSITGLYETRIDLSQLGGD

SEQ ID NO: 33 - protein, 1367 aa, Streptococcus pyogenes
DKKYSIGLAIGTNSVGWAVITDEYKVPSKKFKVLGNTDRHSIKKNLIGALLFDSGETAEATRLKRTARRRYTRRKNRICYLQEIFSNEMAKVDDSFFHRLEESFLVEEDKKHERHPIFGNIVDEVAYHEKYPTIYHLRKKLVDSTDKADLRLIYLALAHMIKFRGHFLIEGDLNPDNSDVDKLFIQLVQTYNQLFEENPINASGVDAKAILSARLSKSRRLENLIAQLPGEKKNGLFGNLIALSLGLTPNFKSNFDLAEDAKLQLSKDTYDDDLDNLLAQIGDQYADLFLAAKNLSDAILLSDILRVNTEITKAPLSASMIKRYDEHHQDLTLLKALVRQQLPEKYKEIFFDQSKNGYAGYIDGGASQEEFYKFIKPILEKMDGTEELLVKLNREDLLRKQRTFDNGSIPHQIHLGELHAILRRQEDFYPFLKDNREKIEKILTFRIPYYVGPLARGNSRFAWMTRKSEETITPWNFEEVVDKGASAQSFIERMTNFDKNLPNEKVLPKHSLLYEYFTVYNELTKVKYVTEGMRKPAFLSGEQKKAIVDLLFKTNRKVTVKQLKEDYFKKIECFDSVEISGVEDRFNASLGTYHDLLKIIKDKDFLDNEENEDILEDIVLTLTLFEDREMIEERLKTYAHLFDDKVMKQLKRRRYTGWGRLSRKLINGIRDKQSGKTILDFLKSDGFANRNFMQLIHDDSLTFKEDIQKAQVSGQGDSLHEHIANLAGSPAIKKGILQTVKVVDELVKVMGRHKPENIVIEMARENQTTQKGQKNSRERMKRIEEGIKELGSQILKEHPVENTQLQNEKLYLYYLQNGRDMYVDQELDINRLSDYDVDHIVPQSFLKDDSIDNKVLTRSDKNRGKSDNVPSEEVVKKMKNYWRQLLNAKLITQRKFDNLTKAERGGLSELDKAGFIKRQLVETRQITKHVAQILDSRMNTKYDENDKLIREVKVITLKSKLVSDFRKDFQFYKVREINNYHHAHDAYLNAVVGTALIKKYPKLESEFVYGDYKVYDVRKMIAKSEQEIGKATAKYFFYSNIMNFFKTEITLANGEIRKRPLIETNGETGEIVWDKGRDFATVRKVLSMPQVNIVKKTEVQTGGFSKESILPKRNSDKLIARKKDWDPKKYGGFDSPTVAYSVLVVAKVEKGKSKKLKSVKELLGITIMERSSFEKNPIDFLEAKGYKEVKKDLIIKLPKYSLFELENGRKRMLASAGELQKGNELALPSKYVNFLYLASHYEKLKGSPEDNEQKQLFVEQHKHYLDEIIEQISEFSKRVILADANLDKVLSAYNKHRDKPIREQAENIIHLFTLTNLGAPAAFKYFDTTIDRKRYTSTKEVLDATLIHQSITGLYETRIDLSQLGGD

SEQ ID NO: 34 - protein, 1367 aa, Streptococcus pyogenes
DKKYSIGLDIGTNSVGWAVITDEYKVPSKKFKVLGNTDRHSIKKNLIGALLFDSGETAEATRLKRTARRRYTRRKNRICYLQEIFSNEMAKVDDSFFHRLEESFLVEEDKKHERHPIFGNIVDEVAYHEKYPTIYHLRKKLVDSTDKADLRLIYLALAHMIKFRGHFLIEGDLNPDNSDVDKLFIQLVQTYNQLFEENPINASGVDAKAILSARLSKSRRLENLIAQLPGEKKNGLFGNLIALSLGLTPNFKSNFDLAEDAKLQLSKDTYDDDLDNLLAQIGDQYADLFLAAKNLSDAILLSDILRVNTEITKAPLSASMIKRYDEHHQDLTLLKALVRQQLPEKYKEIFFDQSKNGYAGYIDGGASQEEFYKFIKPILEKMDGTEELLVKLNREDLLRKQRTFDNGSIPHQIHLGELHAILRRQEDFYPFLKDNREKIEKILTFRIPYYVGPLARGNSRFAWMTRKSEETITPWNFEEVVDKGASAQSFIERMTNFDKNLPNEKVLPKHSLLYEYFTVYNELTKVKYVTEGMRKPAFLSGEQKKAIVDLLFKTNRKVTVKQLKEDYFKKIECFDSVEISGVEDRFNASLGTYHDLLKIIKDKDFLDNEENEDILEDIVLTLTLFEDREMIEERLKTYAHLFDDKVMKQLKRRRYTGWGRLSRKLINGIRDKQSGKTILDFLKSDGFANRNFMQLIHDDSLTFKEDIQKAQVSGQGDSLHEHIANLAGSPAIKKGILQTVKVVDELVKVMGRHKPENIVIEMARENQTTQKGQKNSRERMKRIEEGIKELGSQILKEHPVENTQLQNEKLYLYYLQNGRDMYVDQELDINRLSDYDVDHIVPQSFLKDDSIDNKVLTRSDKNRGKSDNVPSEEVVKKMKNYWRQLLNAKLITQRKFDNLTKAERGGLSELDKAGFIKRQLVETRQITKHVAQILDSRMNTKYDENDKLIREVKVITLKSKLVSDFRKDFQFYKVREINNYHHAHDAYLNAVVGTALIKKYPKLESEFVYGDYKVYDVRKMIAKSEQEIGKATAKYFFYSNIMNFFKTEITLANGEIRKRPLIETNGETGEIVWDKGRDFATVRKVLSMPQVNIVKKTEVQTGGFSKESILPKRNSDKLIARKKDWDPKKYGGFDSPTVAYSVLVVAKVEKGKSKKLKSVKELLGITIMERSSFEKNPIDFLEAKGYKEVKKDLIIKLPKYSLFELENGRKRMLASAGELQKGNELALPSKYVNFLYLASHYEKLKGSPEDNEQKQLFVEQHKHYLDEIIEQISEFSKRVILADANLDKVLSAYNKHRDKPIREQAENIIHLFTLTNLGAPAAFKYFDTTIDRKRYTSTKEVLDATLIHQSITGLYETRIDLSQLGGD

SEQ ID NO: 35 - protein, 1129 aa, Alicyclobacillus acidoterrestris
MAVKSIKVKLRLDDMPEIRAGLWKLHKEVNAGVRYYTEWLSLLRQENLYRRSPNGDGEQECDKTAEECKAELLERLRARQVENGHRGPAGSDDELLQLARQLYELLVPQAIGAKGDAQQIARKFLSPLADKDAVGGLGIAKAGNKPRWVRMREAGEPGWEEEKEKAETRKSADRTADVLRALADFGLKPLMRVYTDSEMSSVEWKPLRKGQAVRTWDRDMFQQAIERMMSWESWNQRVGQEYAKLVEQKNRFEQKNFVGQEHLVHLVNQLQQDMKEASPGLESKEQTAHYVTGRALRGSDKVFEKWGKLAPDAPFDLYDAEIKNVQRRNTRRFGSHDLFAKLAEPEYQALWREDASFLTRYAVYNSILRKLNHAKMFATFTLPDATAHPIWTRFDKLGGNLHQYTFLFNEFGERRHAIRFHKLLKVENGVAREVDDVTVPISMSEQLDNLLPRDPNEPIALYFRDYGAEQHFTGEFGGAKIQCRRDQLAHMHRRRGARDVYLNVSVRVQSQSEARGERRPPYAAVFRLVGDNHRAFVHFDKLSDYLAEHPDDGKLGSEGLLSGLRVMSVDLGLRTSASISVFRVARKDELKPNSKGRVPFFFPIKGNDNLVAVHERSQLLKLPGETESKDLRAIREERQRTLRQLRTQLAYLRLLVRCGSEDVGRRERSWAKLIEQPVDAANHMTPDWREAFENELQKLKSLHGICSDKEWMDAVYESVRRVWRHMGKQVRDWRKDVRSGERPKIRGYAKDVVGGNSIEQIEYLERQYKFLKSWSFFGKVSGQVIRAEKGSRFAITLREHIDHAKEDRLKKLADRIIMEALGYVYALDERGKGKWVAKYPPCQLILLEELSEYQFNNDRPPSENNQLMQWSHRGVFQELINQAQVHDLLVGTMYAAFSSRFDARTGAPGIRCRRVPARCTQEHNPEPFPWWLNKFVVEHTLDACPLRADDLIPTGEGEIFVSPFSAEEGDFHQIHADLNAAQNLQQRLWSDFDISQIRLRCDWGEVDGELVLIPRLTGKRTADSYSNKVFYTNTGVTYYERERGKKRRKVFAQEKLSEEEAELLVEADEAREKSVVLMRDPSGIINRGNWTRQKEFWSMVNQRIEGYLVKQIRSRVPLQDSACENTGDI

SEQ ID NO: 36 - protein, 345 aa, Sulfolobus islandicus
MEVPLYNIFGDNYIIQVATEAENSTIYNNKVEIDDEELRNVLNLAYKIAKNNEDAAAERRGKAKKKKGEEGETTTSNIILPLSGNDKNPWTETLKCYNFPTTVALSEVFKNFSQVKECEEVSAPSFVKPEFYEFGRSPGMVERTRRVKLEVEPHYLIIAAAGWVLTRLGKAKVSEGDYVGVNVFTPTRGILYSLIQNVNGIVPGIKPETAFGLWIARKVVSSVTNPNVSVVRIYTISDAVGQNPTTINGGFSIDLTKLLEKRYLLSERLEAIARNALSISSNMRERYIVLANYIYEYLTGSKRLEDLLYFANRDLIMNLNSDDGKVRDLKLISAYVNGELIRGEG

SEQ ID NO: 37 - protein, 345 aa, Sulfolobus islandicus
MEVPLYNIFGDNYIIQVATEAENSTIYNNKVEIDDEELRNVLNLAYKIAKNNEDAAAERRGKAKKKKGEEGETTTSNIILPLSGNDKNPWTETLKCYNFPTTVALSEVFKNFSQVKECEEVSAPSFVKPEFYKFGRSPGMVERTRRVKLEVEPHYLIMAAAGWVLTRLGKAKVSEGDYVGVNVFTPTRGILYSLIQNVNGIVPGIKPETAFGLWIARKVVSSVTNPNVSVVSIYTISDAVGQNPTTINGGFSIDLTKLLEKRDLLSERLEAIARNALSISSNMRERYIVLANYIYEYLTGSKRLEDLLYFANRDLIMNLNSDDGKVRDLKLISAYVNGELIRGEG

SEQ ID NO: 38 - protein, 986 aa, Unknown
  Description of Unknown: Deltaproteobacteria CasX sequence
MEKRINKIRKKLSADNATKPVSRSGPMKTLLVRVMTDDLKKRLEKRRKKPEVMPQVISNNAANNLRMLLDDYTKMKEAILQVYWQEFKDDHVGLMCKFAQPASKKIDQNKLKPEMDEKGNLTTAGFACSQCGQPLFVYKLEQVSEKGKAYTNYFGRCNVAEHEKLILLAQLKPVKDSDEAVTYSLGKFGQRALDFYSIHVTKESTHPVKPLAQIAGNRYASGPVGKALSDACMGTIASFLSKYQDIIIEHQKVVKGNQKRLESLRELAGKENLEYPSVTLPPQPHTKEGVDAYNEVIARVRMWVNLNLWQKLKLSRDDAKPLLRLKGFPSFPVVERRENEVDWWNTINEVKKLIDAKRDMGRVFWSGVTAEKRNTILEGYNYLPNENDHKKREGSLENPKKPAKRQFGDLLLYLEKKYAGDWGKVFDEAWERIDKKIAGLTSHIEREEARNAEDAQSKAVLTDWLRAKASFVLERLKEMDEKEFYACEIQLQKWYGDLRGNPFAVEAENRVVDISGFSIGSDGHSIQYRNLLAWKYLENGKREFYLLMNYGKKGRIRFTDGTDIKKSGKWQGLLYGGGKAKVIDLTFDPDDEQLIILPLAFGTRQGREFIWNDLLSLETGLIKLANGRVIEKTIYNKKIGRDEPALFVALTFERREVVDPSNIKPVNLIGVARGENIPAVIALTDPEGCPLPEFKDSSGGPTDILRIGEGYKEKQRAIQAAKEVEQRRAGGYSRKFASKSRNLADDMVRNSARDLFYHAVTHDAVLVFANLSRGFGRQGKRTFMTERQYTKMEDWLTAKLAYEGLTSKTYLSKTLAQYTSKTCSNCGFTITYADMDVMLVRLKKTSDGWATTLNNKELKAEYQITYYNRYKRQTVEKELSAELDRLSEESGNNDISKWTKGRRDEALFLLKKRFSHRPVQEQFVCLDCGHEVHAAEQAALNIARSWLFLNSNSTEFKSYKSGKQPFVGAWQAFYKRRLKEVWKPNA

SEQ ID NO: 39 - protein, 1210 aa, Unknown
  Description of Unknown: uncultured Parcubacteria group bacterium sequence
MSKRHPRISGVKGYRLHAQRLEYTGKSGAMRTIKYPLYSSPSGGRTVPREIVSAINDDYVGLYGLSNFDDLYNAEKRNEEKVYSVLDFWYDCVQYGAVFSYTAPGLLKNVAEVRGGSYELTKTLKGSHLYDELQIDKVIKFLNKKEISRANGSLDKLKKDIIDCFKAEYRERHKDQCNKLADDIKNAKKDAGASLGERQKKLFRDFFGISEQSENDKPSFTNPLNLTCCLLPFDTVNNNRNRGEVLFNKLKEYAQKLDKNEGSLEMWEYIGIGNSGTAFSNFLGEGFLGRLRENKITELKKAMMDITDAWRGQEQEEELEKRLRILAALTIKLREPKFDNHWGGYRSDINGKLSSWLQNYINQTVKIKEDLKGHKKDLKKAKEMINRFGESDTKEEAVVSSLLESIEKIVPDDSADDEKPDIPAIAIYRRFLSDGRLTLNRFVQREDVQEALIKERLEAEKKKKPKKRKKKSDAEDEKETIDFKELFPHLAKPLKLVPNFYGDSKRELYKKYKNAAIYTDALWKAVEKIYKSAFSSSLKNSFFDTDFDKDFFIKRLQKIFSVYRRFNTDKWKPIVKNSFAPYCDIVSLAENEVLYKPKQSRSRKSAAIDKNRVRLPSTENIAKAGIALARELSVAGFDWKDLLKKEEHEEYIDLIELHKTALALLLAVTETQLDISALDFVENGTVKDFMKTRDGNLVLEGRFLEMFSQSIVFSELRGLAGLMSRKEFITRSAIQTMNGKQAELLYIPHEFQSAKITTPKEMSRAFLDLAPAEFATSLEPESLSEKSLLKLKQMRYYPHYFGYELTRTGQGIDGGVAENALRLEKSPVKKREIKCKQYKTLGRGQNKIVLYVRSSYYQTQFLEWFLHRPKNVQTDVAVSGSFLIDEKKVKTRWNYDALTVALEPVSGSERVFVSQPFTIFPEKSAEEEGQRYLGIDIGEYGIAYTALEITGDSAKILDQNFISDPQLKTLREEVKGLKLDQRRGTFAMPSTKIARIRESLVHSLRNRIHHLALKHKAKIVYELEVSRFEEGKQKIKKVYATLKKADVYSEIDADKNLQTTVWGKLAVASEISASYTSQFCGACKKLWRAEMQVDETITTQELIGTVRVIKGGTLIDAIKDFMRPPIFDENDTPFPKYRDFCDKHHISKKMRGNSCLFICPFCRANADADIQASQTIALLRYVKEEKKVEDYFERFRKLKNIKVLGQMKKI

SEQ ID NO: 40 - protein, 1140 aa, Bacillus hisashii
MAPKKKRKVGIHGVPAAATRSFILKIEPNEEVKKGLWKTHEVLNHGIAYYMNILKLIRQEAIYEHHEQDPKNPKKVSKAEIQAELWDFVLKMQKCNSFTHEVDKDEVFNILRELYEELVPSSVEKKGEANQLSNKFLYPLVDPNSQSGKGTASSGRKPRWYNLKIAGDPSWEEEKKKWEEDKKKDPLAKILGKLAEYGLIPLFIPYTDSNEPIVKEIKWMEKSRNQSVRRLDKDMFIQALERFLSWESWNLKVKEEYEKVEKEYKTLEERIKEDIQALKALEQYEKERQEQLLRDTLNTNEYRLSKRGLRGWREIIQKWLKMDENEPSEKYLEVFKDYQRKHPREAGDYSVYEFLSKKENHFIWRNHPEYPYLYATFCEIDKKKKDAKQQATFTLADPINHPLWVRFEERSGSNLNKYRILTEQLHTEKLKKKLTVQLDRLIYPTESGGWEEKGKVDIVLLPSRQFYNQIFLDIEEKGKHAFTYKDESIKFPLKGTLGGARVQFDRDHLRRYPHKVESGNVGRIYFNMTVNIEPTESPVSKSLKIHRDDFPKVVNFKPKELTEWIKDSKGKKLKSGIESLEIGLRVMSIDLGQRQAAAASIFEVVDQKPDIEGKLFFPIKGTELYAVHRASFNIKLPGETLVKSREVLRKAREDNLKLMNQKLNFLRNVLHFQQFEDITEREKRVTKWISRQENSDVPLVYQDELIQIRELMYKPYKDWVAFLKQLHKRLEVEIGKEVKHWRKSLSDGRKGLYGISLKNIDEIDRTRKFLLRWSLRPTEPGEVRRLEPGQRFAIDQLNHLNALKEDRLKKMANTIIMHALGYCYDVRKKKWQAKNPACQIILFEDLSNYNPYEERSRFENSKLMKWSRREIPRQVALQGEIYGLQVGEVGAQFSSRFHAKTGSPGIRCSVVTKEKLQDNRFFKNLQREGRLTLDKIAVLKEGDLYPDKGGEKFISLSKDRKCVTTHADINAAQNLQKRFWTRTHGFYKVYCKAYQVDGQTVYIPESKDQKQKIIEEFGEGYFILKDGVYEWVNAGKLKIKKGSSKQSSSELVDSDILKDSFDLASELKGEKLMLYRDPSGNVFPSDKWMAAGVFFGKLERILISKLTNQYSISTIEDDSSKQSMKRPAATKKAGQAKKKK

SEQ ID NO: 41 - DNA, 306 bp, Artificial Sequence
  Description of Artificial Sequence: Synthetic polynucleotide
tgcctgtcatacgaaaccgagatactgacagtagaatatggccttctgccaatcgggaagattgtggagaaacggatagaatgcacagtttactctgtcgataacaatggtaacatttatactcagccagttgcccagtggcacgaccggggagagcaggaagtattcgaatactgtctggaggatggaagtctcattagggccactaaggaccacaaatttatgacagtcgatggccagatgctgcctatagacgaaatctttgagcgagagttggacctcatgcgagttgacaaccttcctaat

SEQ ID NO: 42 - protein, 102 aa, Artificial Sequence
  Description of Artificial Sequence: Synthetic polypeptide
CLSYETEILTVEYGLLPIGKIVEKRIECTVYSVDNNGNIYTQPVAQWHDRGEQEVFEYCLEDGSLIRATKDHKFMTVDGQMLPIDEIFERELDLMRVDNLPN

SEQ ID NO: 43 - DNA, 108 bp, Artificial Sequence
  Description of Artificial Sequence: Synthetic polynucleotide
atgatcaagatagctacaaggaagtatcttggcaaacaaaacgtttatgatattggagtcgaaagagatcacaactttgctctgaagaacggattcatagcttctaat

SEQ ID NO: 44 - protein, 36 aa, Artificial Sequence
  Description of Artificial Sequence: Synthetic polypeptide
MIKIATRKYLGKQNVYDIGVERDHNFALKNGFIASN

SEQ ID NO: 45 - DNA, 303 bp, Artificial Sequence
  Description of Artificial Sequence: Synthetic polynucleotide
tgcctgtcttatgataccgagatacttaccgttgaatatggcttcttgcctattggaaagattgtcgaagagagaattgaatgcacagtatatactgtagacaagaatggtttcgtttacacacagcccattgctcaatggcacaatcgcggcgaacaagaagtatttgagtactgtctcgaggatggaagcatcatacgagcaactaaagatcataaattcatgaccactgacgggcagatgttgccaatagatgagatattcgagcggggcttggatctcaaacaagtggatggattgcca

SEQ ID NO: 46 - protein, 101 aa, Artificial Sequence
  Description of Artificial Sequence: Synthetic polypeptide
CLSYDTEILTVEYGFLPIGKIVEERIECTVYTVDKNGFVYTQPIAQWHNRGEQEVFEYCLEDGSIIRATKDHKFMTTDGQMLPIDEIFERGLDLKQVDGLP

SEQ ID NO: 47 - DNA, 159 bp, Artificial Sequence
  Description of Artificial Sequence: Synthetic polynucleotide
atgaagaggactgccgatggatcagagtttgaatctcccaagaagaagaggaaagtaaagataatatctcgaaaaagtcttggtacccaaaatgtctatgatattggagtggagaaagatcacaacttccttctcaagaacggtctcgtagccagcaac

SEQ ID NO: 48 - protein, 53 aa, Artificial Sequence
  Description of Artificial Sequence: Synthetic polypeptide
MKRTADGSEFESPKKKRKVKIISRKSLGTQNVYDIGVEKDHNFLLKNGLVASN

SEQ ID NO: 49 - protein, 16 aa, Artificial Sequence
  Description of Artificial Sequence: Synthetic peptide
SGSETPGTSESATPES

SEQ ID NO: 50 - protein, 4 aa, Artificial Sequence
  Description of Artificial Sequence: Synthetic peptide
SGGS

SEQ ID NO: 51 - protein, 120 aa, Artificial Sequence
  Description of Artificial Sequence: Synthetic polypeptide
  MISC_FEATURE (1)..(120): This sequence may encompass 1-30 "Ser Gly Gly Ser" repeating units
SGGSSGGSSGGSSGGSSGGSSGGSSGGSSGGSSGGSSGGSSGGSSGGSSGGSSGGSSGGSSGGSSGGSSGGSSGGSSGGSSGGSSGGSSGGSSGGSSGGSSGGSSGGSSGGSSGGSSGGS

SEQ ID NO: 52 - protein, 120 aa, Artificial Sequence
  Description of Artificial Sequence: Synthetic polypeptide
  MISC_FEATURE (1)..(120): This sequence may encompass 1-30 "Gly Gly Gly Ser" repeating units
GGGSGGGSGGGSGGGSGGGSGGGSGGGSGGGSGGGSGGGSGGGSGGGSGGGSGGGSGGGSGGGSGGGSGGGSGGGSGGGSGGGSGGGSGGGSGGGSGGGSGGGSGGGSGGGSGGGSGGGS

SEQ ID NO: 53 - protein, 150 aa, Artificial Sequence
  Description of Artificial Sequence: Synthetic polypeptide
  MISC_FEATURE (1)..(150): This sequence may encompass 1-30 "Gly Gly Gly Gly Ser" repeating units
GGGGSGGGGSGGGGSGGGGSGGGGSGGGGSGGGGSGGGGSGGGGSGGGGSGGGGSGGGGSGGGGSGGGGSGGGGSGGGGSGGGGSGGGGSGGGGSGGGGSGGGGSGGGGSGGGGSGGGGSGGGGSGGGGSGGGGSGGGGSGGGGSGGGGS

SEQ ID NO: 54 - protein, 30 aa, Artificial Sequence
  Description of Artificial Sequence: Synthetic polypeptide
  MISC_FEATURE (1)..(30): This sequence may encompass 1-30 residues
GGGGGGGGGGGGGGGGGGGGGGGGGGGGGG

SEQ ID NO: 55 - protein, 150 aa, Artificial Sequence
  Description of Artificial Sequence: Synthetic polypeptide
  MISC_FEATURE (1)..(150): This sequence may encompass 1-30 "Glu Ala Ala Ala Lys" repeating units
EAAAKEAAAKEAAAKEAAAKEAAAKEAAAKEAAAKEAAAKEAAAKEAAAKEAAAKEAAAKEAAAKEAAAKEAAAKEAAAKEAAAKEAAAKEAAAKEAAAKEAAAKEAAAKEAAAKEAAAKEAAAKEAAAKEAAAKEAAAKEAAAKEAAAK

SEQ ID NO: 56 - protein, 90 aa, Artificial Sequence
  Description of Artificial Sequence: Synthetic polypeptide
  MISC_FEATURE (1)..(90): This sequence may encompass 1-30 "Gly Gly Ser" repeating units
GGSGGSGGSGGSGGSGGSGGSGGSGGSGGSGGSGGSGGSGGSGGSGGSGGSGGSGGSGGSGGSGGSGGSGGSGGSGGSGGSGGSGGSGGS

SEQ ID NO: 57 - protein, 60 aa, Artificial Sequence
  Description of Artificial Sequence: Synthetic polypeptide
  MOD_RES (1)..(1): Any amino acid
  MOD_RES (3)..(3): Any amino acid
  MOD_RES (5)..(5): Any amino acid
  MOD_RES (7)..(7): Any amino acid
  MOD_RES (9)..(9): Any amino acid
  MOD_RES (11)..(11): Any amino acid
  MOD_RES (13)..(13): Any amino acid
  MOD_RES (15)..(15): Any amino acid
  MOD_RES (17)..(17): Any amino acid
  MOD_RES (19)..(19): Any amino acid
  MOD_RES (21)..(21): Any amino acid
  MOD_RES (23)..(23): Any amino acid
  MOD_RES (25)..(25): Any amino acid
  MOD_RES (27)..(27): Any amino acid
  MOD_RES (29)..(29): Any amino acid
  MOD_RES (31)..(31): Any amino acid
  MOD_RES (33)..(33): Any amino acid
  MOD_RES (35)..(35): Any amino acid
  MOD_RES (37)..(37): Any amino acid
  MOD_RES (39)..(39): Any amino acid
  MOD_RES (41)..(41): Any amino acid
  MOD_RES (43)..(43): Any amino acid
  MOD_RES (45)..(45): Any amino acid
  MOD_RES (47)..(47): Any amino acid
  MOD_RES (49)..(49): Any amino acid
  MOD_RES (51)..(51): Any amino acid
  MOD_RES (53)..(53): Any amino acid
  MOD_RES (55)..(55): Any amino acid
  MOD_RES (57)..(57): Any amino acid
  MOD_RES (59)..(59): Any amino acid
  MISC_FEATURE (1)..(60): This sequence may encompass 1-30 "Xaa Pro" repeating units
XPXPXPXPXPXPXPXPXPXPXPXPXPXPXPXPXPXPXPXPXPXPXPXPXPXPXPXPXPXP

SEQ ID NO: 58 - protein, 5 aa, Artificial Sequence
  Description of Artificial Sequence: Synthetic peptide
PAPAP

SEQ ID NO: 59 - protein, 6 aa, Artificial Sequence
  Description of Artificial Sequence: Synthetic peptide
PAPAPA

SEQ ID NO: 60 - protein, 7 aa, Artificial Sequence
  Description of Artificial Sequence: Synthetic peptide
PAPAPAP

SEQ ID NO: 61 - protein, 8 aa, Artificial Sequence
  Description of Artificial Sequence: Synthetic peptide
PAPAPAPA

SEQ ID NO: 62 - protein, 9 aa, Artificial Sequence
  Description of Artificial Sequence: Synthetic peptide
PAPAPAPAP

SEQ ID NO: 63 - protein, 15 aa, Artificial Sequence
  Description of Artificial Sequence: Synthetic peptide
PAPAPAPAPAPAPAP

SEQ ID NO: 64 - protein, 21 aa, Artificial Sequence
  Description of Artificial Sequence: Synthetic peptide
PAPAPAPAPAPAPAPAPAPAP

SEQ ID NO: 65 - protein, 24 aa, Artificial Sequence
  Description of Artificial Sequence: Synthetic peptide
SGGSSGSETPGTSESATPESSGGS

SEQ ID NO: 66 - protein, 32 aa, Artificial Sequence
  Description of Artificial Sequence: Synthetic polypeptide
SGGSSGGSSGSETPGTSESATPESSGGSSGGS

SEQ ID NO: 67 - protein, 104 aa, Artificial Sequence
  Description of Artificial Sequence: Synthetic polypeptide
GGSGGSPGSPAGSPTSTEEGTSESATPESGPGTSTEPSEGSAPGSPAGSPTSTEEGTSTEPSEGSAPGTSTEPSEGSAPGTSESATPESGPGSEPATSGGSGGS

SEQ ID NO: 68 - protein, 24 aa, Artificial Sequence
  Description of Artificial Sequence: Synthetic peptide
SGGSSGGSSGSETPGTSESATPES

SEQ ID NO: 69 - protein, 40 aa, Artificial Sequence
  Description of Artificial Sequence: Synthetic polypeptide
SGGSSGGSSGSETPGTSESATPESSGGSSGGSSGGSSGGS

SEQ ID NO: 70 - protein, 64 aa, Artificial Sequence
  Description of Artificial Sequence: Synthetic polypeptide
SGGSSGGSSGSETPGTSESATPESSGGSSGGSSGGSSGGSSGSETPGTSESATPESSGGSSGGS

SEQ ID NO: 71 - protein, 92 aa, Artificial Sequence
  Description of Artificial Sequence: Synthetic polypeptide
PGSPAGSPTSTEEGTSESATPESGPGTSTEPSEGSAPGSPAGSPTSTEEGTSTEPSEGSAPGTSTEPSEGSAPGTSESATPESGPGSEPATS

SEQ ID NO: 72 - protein, 18 aa, Artificial Sequence
  Description of Artificial Sequence: Synthetic peptide
KRTADGSEFESPKKKRKV

SEQ ID NO: 73 - protein, 16 aa, Artificial Sequence
  Description of Artificial Sequence: Synthetic peptide
KRPAATKKAGQAKKKK

SEQ ID NO: 74 - protein, 17 aa, Artificial Sequence
  Description of Artificial Sequence: Synthetic peptide
KKTELQTTNAENKTKKL

SEQ ID NO: 75 - protein, 19 aa, Artificial Sequence
  Description of Artificial Sequence: Synthetic peptide
KRGINDRNFWRGENGRKTR

SEQ ID NO: 76 - protein, 16 aa, Artificial Sequence
  Description of Artificial Sequence: Synthetic peptide
RKSGKIAAIVVKRPRK

SEQ ID NO: 77 - protein, 7 aa, Artificial Sequence
  Description of Artificial Sequence: Synthetic peptide
PKKKRKV

SEQ ID NO: 78 - protein, 30 aa, Artificial Sequence
  Description of Artificial Sequence: Synthetic polypeptide
MDSLLMNRRKFLYQFKNVRWAKGRRETYLC

SEQ ID NO: 79 - protein, 84 aa, Bacillus phage PBS2
MTNLSDIIEKETGKQLVIQESILMLPEEVEEVIGNKPESDILVHTAYDESTDENVMLLTSDAPEYKPWALVIQDSNGENKIKML

SEQ ID NO: 80 - RNA, 80 nt, Artificial Sequence
  Description of Artificial Sequence: Synthetic oligonucleotide
guuuuagagcuagaaauagcaaguuaaaauaaggcuaguccguuaucaacuugaaaaaguggcaccgagucggugcuuuu

SEQ ID NO: 81 - protein, 345 aa, Sulfolobus islandicus; identical to SEQ ID NO: 36

SEQ ID NO: 82 - protein, 987 aa, Unknown
  Description of Unknown: Deltaproteobacteria CasX sequence
MEKRINKIRKKLSADNATKPVSRSGPMKTLLVRVMTDDLKKRLEKRRKKPEVMPQVISNNAANNLRMLLDDYTKMKEAILQVYWQEFKDDHVGLMCKFAQPASKKIDQNKLKPEMDEKGNLTTAGFACSQCGQPLFVYKLEQVSEKGKAYTNYFGRCNVAEHEKLILLAQLKPVKDSDEAVTYSLGKFGQRALDFYSIHVTKESTHPVKPLAQIAGNRYASGPVGKALSDACMGTIASFLSKYQDIIIEHQKVVKGNQKRLESLRELAGKENLEYPSVTLPPQPHTKEGVDFAYNEVIARVRMWVNLNLWQKLKLSRDDAKPLLRLKGFPSFPVVERRENEVDWWNTINEVKKLIDAKRDMGRVFWSGVTAEKRNTILEGYNYLPNENDHKKREGSLENPKKPAKRQFGDLLLYLEKKYAGDWGKVFDEAWERIDKKIAGLTSHIEREEARNAEDAQSKAVLTDWLRAKASFVLERLKEMDEKEFYACEIQLQKWYGDLRGNPFAVEAENRVVDISGFSIGSDGHSIQYRNLLAWKYLENGKREFYLLMNYGKKGRIRFTDGTDIKKSGKWQGLLYGGGKAKVIDLTFDPDDEQLIILPLAFGTRQGREFIWNDLLSLETGLIKLANGRVIEKTIYNKKIGRDEPALFVALTFERREVVDPSNIKPVNLIGVARGENIPAVIALTDPEGCPLPEFKDSSGGPTDILRIGEGYKEKQRAIQAAKEVEQRRAGGYSRKFASKSRNLADDMVRNSARDLFYHAVTHDAVLVFANLSRGFGRQGKRTFMTERQYTKMEDWLTAKLAYEGLTSKTYLSKTLAQYTSKTCSNCGFTITYADMDVMLVRLKKTSDGWATTLNNKELKAEYQITYYNRYKRQTVEKELSAELDRLSEESGNNDISKWTKGRRDEALFLLKKRFSHRPVQEQFVCLDCGHEVHAAEQAALNIARSWLFLNSNSTEFKSYKSGKQPFVGAWQAFYKRRLKEVWKPNA

SEQ ID NO: 83 - protein, 1300 aa, Francisella novicida
MSIYQEFVNKYSLSKTLRFELIPQGKTLENIKARGLILDDEKRAKDYKKAKQIIDKYHQFFIEEILSSVCISEDLLQNYSDVYFKLKKSDDDNLQKDFKSAKDTIKKQISEYIKDSEKFKNLFNQNLIDAKKGQESDLILWLKQSKDNGIELFKANSDITDIDEALEIIKSFKGWTTYFKGFHENRKNVYSSNDIPTSIIYRIVDDNLPKFLENKAKYESLKDKAPEAINYEQIKKDLAEELTFDIDYKTSEVNQRVFSLDEVFEIANFNNYLNQSGITKFNTIIGGKFVNGENTKRKGINEYINLYSQQINDKTLKKYKMSVLFKQILSDTESKSFVIDKLEDDSDVVTTMQSFYEQIAAFKTVEEKSIKETLSLLFDDLKAQKLDLSKIYFKNDKSLTDLSQQVFDDYSVIGTAVLEYITQQIAPKNLDNPSKKEQELIAKKTEKAKYLSLETIKLALEEFNKHRDIDKQCRFEEILANFAAIPMIFDEIAQNKDNLAQISIKYQNQGKKDLLQASAEDDVKAIKDLLDQTNNLLHKLKIFHISQSEDKANILDKDEHFYLVFEECYFELANIVPLYNKIRNYITQKPYSDEKFKLNFENSTLANGWDKNKEPDNTAILFIKDDKYYLGVMNKKNNKIFDDKAIKENKGEGYKKIVYKLLPGANKMLPKVFFSAKSIKFYNPSEDILRIRNHSTHTKNGSPQKGYEKFEFNIEDCRKFIDFYKQSISKHPEWKDFGFRFSDTQRYNSIDEFYREVENQGYKLTFENISESYIDSVVNQGKLYLFQIYNKDFSAYSKGRPNLHTLYWKALFDERNLQDVVYKLNGEAELFYRKQSIPKKITHPAKEAIANKNKDNPKKESVFEYDLIKDKRFTEDKFFFHCPITINFKSSGANKFNDEINLLLKEKANDVHILSIDRGERHLAYYTLVDGKGNIIKQDTFNIIGNDRMKTNYHDKLAAIEKDRDSARKDWKKINNIKEMKEGYLSQVVHEIAKLVIEYNAIVVFEDLNFGFKRGRFKVEKQVYQKLEKMLIEKLNYLVFKDNEFDKTGGVLRAYQLTAPFETFKKMGKQTGIIYYVPAGFTSKICPVTGFVNQLYPKYESVSKSQEFFSKFDKICYNLDKGYFEFSFDYKNFGDKAAKGKWTIASFGSRLINFRNSDKNHNWDTREVYPTKELEKLLKDYSIEYGHGECIKAAICGESDKKFFAKLTSVLNTILQMRNSKTGTELDYLISPVADVNGNFFDSRQAPKNMPQDADANGAYHIGLKGLMLLGRIKNNQEGKKLNLVIKNEEYFEFVQNRNN

SEQ ID NO: 84 - protein, 1300 aa, Francisella novicida
MSIYQEFVNKYSLSKTLRFELIPQGKTLENIKARGLILDDEKRAKDYKKAKQIIDKYHQFFIEEILSSVCISEDLLQNYSDVYFKLKKSDDDNLQKDFKSAKDTIKKQISEYIKDSEKFKNLFNQNLIDAKKGQESDLILWLKQSKDNGIELFKANSDITDIDEALEIIKSFKGWTTYFKGFHENRKNVYSSNDIPTSIIYRIVDDNLPKFLENKAKYESLKDKAPEAINYEQIKKDLAEELTFDIDYKTSEVNQRVFSLDEVFEIANFNNYLNQSGITKFNTIIGGKFVNGENTKRKGINEYINLYSQQINDKTLKKYKMSVLFKQILSDTESKSFVIDKLEDDSDVVTTMQSFYEQIAAFKTVEEKSIKETLSLLFDDLKAQKLDLSKIYFKNDKSLTDLSQQVFDDYSVIGTAVLEYITQQIAPKNLDNPSKKEQELIAKKTEKAKYLSLETIKLALEEFNKHRDIDKQCRFEEILANFAAIPMIFDEIAQNKDNLAQISIKYQNQGKKDLLQASAEDDVKAIKDLLDQTNNLLHKLKIFHISQSEDKANILDKDEHFYLVFEECYFELANIVPLYNKIRNYITQKPYSDEKFKLNFENSTLANGWDKNKEPDNTAILFIKDDKYYLGVMNKKNNKIFDDKAIKENKGEGYKKIVYKLLPGANKMLPKVFFSAKSIKFYNPSEDILRIRNHSTHTKNGSPQKGYEKFEFNIEDCRKFIDFYKQSISKHPEWKDFGFRFSDTQRYNSIDEFYREVENQGYKLTFENISESYIDSVVNQGKLYLFQIYNKDFSAYSKGRPNLHTLYWKALFDERNLQDVVYKLNGEAELFYRKQSIPKKITHPAKEAIANKNKDNPKKESVFEYDLIKDKRFTEDKFFFHCPITINFKSSGANKFNDEINLLLKEKANDVHILSIARGERHLAYYTLVDGKGNIIKQDTFNIIGNDRMKTNYHDKLAAIEKDRDSARKDWKKINNIKEMKEGYLSQVVHEIAKLVIEYNAIVVFEDLNFGFKRGRFKVEKQVYQKLEKMLIEKLNYLVFKDNEFDKTGGVLRAYQLTAPFETFKKMGKQTGIIYYVPAGFTSKICPVTGFVNQLYPKYESVSKSQEFFSKFDKICYNLDKGYFEFSFDYKNFGDKAAKGKWTIASFGSRLINFRNSDKNHNWDTREVYPTKELEKLLKDYSIEYGHGECIKAAICGESDKKFFAKLTSVLNTILQMRNSKTGTELDYLISPVADVNGNFFDSRQAPKNMPQDADANGAYHIGLKGLMLLGRIKNNQEGKKLNLVIKNEEYFEFVQNRNN

SEQ ID NO: 85 - protein, 1300 aa, Francisella novicida
MSIYQEFVNKYSLSKTLRFELIPQGKTLENIKARGLILDDEKRAKDYKKAKQIIDKYHQFFIEEILSSVCISEDLLQNYSDVYFKLKKSDDDNLQKDFKSAKDTIKKQISEYIKDSEKFKNLFNQNLIDAKKGQESDLILWLKQSKDNGIELFKANSDITDIDEALEIIKSFKGWTTYFKGFHENRKNVYSSNDIPTSIIYRIVDDNLPKFLENKAKYESLKDKAPEAINYEQIKKDLAEELTFDIDYKTSEVNQRVFSLDEVFEIANFNNYLNQSGITKFNTIIGGKFVNGENTKRKGINEYINLYSQQINDKTLKKYKMSVLFKQILSDTESKSFVIDKLEDDSDVVTTMQSFYEQIAAFKTVEEKSIKETLSLLFDDLKAQKLDLSKIYFKNDKSLTDLSQQVFDDYSVIGTAVLEYITQQIAPKNLDNPSKKEQELIAKKTEKAKYLSLETIKLALEEFNKHRDIDKQCRFEEILANFAAIPMIFDEIAQNKDNLAQISIKYQNQGKKDLLQASAEDDVKAIKDLLDQTNNLLHKLKIFHISQSEDKANILDKDEHFYLVFEECYFELANIVPLYNKIRNYITQKPYSDEKFKLNFENSTLANGWDKNKEPDNTAILFIKDDKYYLGVMNKKNNKIFDDKAIKENKGEGYKKIVYKLLPGANKMLPKVFFSAKSIKFYNPSEDILRIRNHSTHTKNGSPQKGYEKFEFNIEDCRKFIDFYKQSISKHPEWKDFGFRFSDTQRYNSIDEFYREVENQGYKLTFENISESYIDSVVNQGKLYLFQIYNKDFSAYSKGRPNLHTLYWKALFDERNLQDVVYKLNGEAELFYRKQSIPKKITHPAKEAIANKNKDNPKKESVFEYDLIKDKRFTEDKFFFHCPITINFKSSGANKFNDEINLLLKEKANDVHILSIDRGERHLAYYTLVDGKGNIIKQDTFNIIGNDRMKTNYHDKLAAIEKDRDSARKDWKKINNIKEMKEGYLSQVVHEIAKLVIEYNAIVVFADLNFGFKRGRFKVEKQVYQKLEKMLIEKLNYLVFKDNEFDKTGGVLRAYQLTAPFETFKKMGKQTGIIYYVPAGFTSKICPVTGFVNQLYPKYESVSKSQEFFSKFDKICYNLDKGYFEFSFDYKNFGDKAAKGKWTIASFGSRLINFRNSDKNHNWDTREVYPTKELEKLLKDYSIEYGHGECIKAAICGESDKKFFAKLTSVLNTILQMRNSKTGTELDYLISPVADVNGNFFDSRQAPKNMPQDADANGAYHIGLKGLMLLGRIKNNQEGKKLNLVIKNEEYFEFVQNRNN

SEQ ID NO: 86 - protein, 1300 aa, Francisella novicida
MSIYQEFVNKYSLSKTLRFELIPQGKTLENIKARGLILDDEKRAKDYKKAKQIIDKYHQFFIEEILSSVCISEDLLQNYSDVYFKLKKSDDDNLQKDFKSAKDTIKKQISEYIKDSEKFKNLFNQNLIDAKKGQESDLILWLKQSKDNGIELFKANSDITDIDEALEIIKSFKGWTTYFKGFHENRKNVYSSNDIPTSIIYRIVDDNLPKFLENKAKYESLKDKAPEAINYEQIKKDLAEELTFDIDYKTSEVNQRVFSLDEVFEIANFNNYLNQSGITKFNTIIGGKFVNGENTKRKGINEYINLYSQQINDKTLKKYKMSVLFKQILSDTESKSFVIDKLEDDSDVVTTMQSFYEQIAAFKTVEEKSIKETLSLLFDDLKAQKLDLSKIYFKNDKSLTDLSQQVFDDYSVIGTAVLEYITQQIAPKNLDNPSKKEQELIAKKTEKAKYLSLETIKLALEEFNKHRDIDKQCRFEEILANFAAIPMIFDEIAQNKDNLAQISIKYQNQGKKDLLQASAEDDVKAIKDLLDQTNNLLHKLKIFHISQSEDKANILDKDEHFYLVFEECYFELANIVPLYNKIRNYITQKPYSDEKFKLNFENSTLANGWDKNKEPDNTAILFIKDDKYYLGVMNKKNNKIFDDKAIKENKGEGYKKIVYKLLPGANKMLPKVFFSAKSIKFYNPSEDILRIRNHSTHTKNGSPQKGYEKFEFNIEDCRKFIDFYKQSISKHPEWKDFGFRFSDTQRYNSIDEFYREVENQGYKLTFENISESYIDSVVNQGKLYLFQIYNKDFSAYSKGRPNLHTLYWKALFDERNLQDVVYKLNGEAELFYRKQSIPKKITHPAKEAIANKNKDNPKKESVFEYDLIKDKRFTEDKFFFHCPITINFKSSGANKFNDEINLLLKEKANDVHILSIDRGERHLAYYTLVDGKGNIIKQDTFNIIGNDRMKTNYHDKLAAIEKDRDSARKDWKKINNIKEMKEGYLSQVVHEIAKLVIEYNAIVVFEDLNFGFKRGRFKVEKQVYQKLEKMLIEKLNYLVFKDNEFDKTGGVLRAYQLTAPFETFKKMGKQTGIIYYVPAGFTSKICPVTGFVNQLYPKYESVSKSQEFFSKFDKICYNLDKGYFEFSFDYKNFGDKAAKGKWTIASFGSRLINFRNSDKNHNWDTREVYPTKELEKLLKDYSIEYGHGECIKAAICGESDKKFFAKLTSVLNTILQMRNSKTGTELDYLISPVADVNGNFFDSRQAPKNMPQDAAANGAYHIGLKGLMLLGRIKNNQEGKKLNLVIKNEEYFEFVQNRNN

SEQ ID NO: 87 - protein, 1300 aa, Francisella novicida
MSIYQEFVNKYSLSKTLRFELIPQGKTLENIKARGLILDDEKRAKDYKKAKQIIDKYHQFFIEEILSSVCISEDLLQNYSDVYFKLKKSDDDNLQKDFKSAKDTIKKQISEYIKDSEKFKNLFNQNLIDAKKGQESDLILWLKQSKDNGIELFKANSDITDIDEALEIIKSFKGWTTYFKGFHENRKNVYSSNDIPTSIIYRIVDDNLPKFLENKAKYESLKDKAPEAINYEQIKKDLAEELTFDIDYKTSEVNQRVFSLDEVFEIANFNNYLNQSGITKFNTIIGGKFVNGENTKRKGINEYINLYSQQINDKTLKKYKMSVLFKQILSDTESKSFVIDKLEDDSDVVTTMQSFYEQIAAFKTVEEKSIKETLSLLFDDLKAQKLDLSKIYFKNDKSLTDLSQQVFDDYSVIGTAVLEYITQQIAPKNLDNPSKKEQELIAKKTEKAKYLSLETIKLALEEFNKHRDIDKQCRFEEILANFAAIPMIFDEIAQNKDNLAQISIKYQNQGKKDLLQASAEDDVKAIKDLLDQTNNLLHKLKIFHISQSEDKANILDKDEHFYLVFEECYFELANIVPLYNKIRNYITQKPYSDEKFKLNFENSTLANGWDKNKEPDNTAILFIKDDKYYLGVMNKKNNKIFDDKAIKENKGEGYKKIVYKLLPGANKMLPKVFFSAKSIKFYNPSEDILRIRNHSTHTKNGSPQKGYEKFEFNIEDCRKFIDFYKQSISKHPEWKDFGFRFSDTQRYNSIDEFYREVENQGYKLTFENISESYIDSVVNQGKLYLFQIYNKDFSAYSKGRPNLHTLYWKALFDERNLQDVVYKLNGEAELFYRKQSIPKKITHPAKEAIANKNKDNPKKESVFEYDLIKDKRFTEDKFFFHCPITINFKSSGANKFNDEINLLLKEKANDVHILSIARGERHLAYYTLVDGKGNIIKQDTFNIIGNDRMKTNYHDKLAAIEKDRDSARKDWKKINNIKEMKEGYLSQVVHEIAKLVIEYNAIVVFADLNFGFKRGRFKVEKQVYQKLEKMLIEKLNYLVFKDNEFDKTGGVLRAYQLTAPFETFKKMGKQTGIIYYVPAGFTSKICPVTGFVNQLYPKYESVSKSQEFFSKFDKICYNLDKGYFEFSFDYKNFGDKAAKGKWTIASFGSRLINFRNSDKNHNWDTREVYPTKELEKLLKDYSIEYGHGECIKAAICGESDKKFFAKLTSVLNTILQMRNSKTGTELDYLISPVADVNGNFFDSRQAPKNMPQDADANGAYHIGLKGLMLLGRIKNNQEGKKLNLVIKNEEYFEFVQNRNN

SEQ ID NO: 88 - protein, 1300 aa, Francisella novicida
MSIYQEFVNKYSLSKTLRFELIPQGKTLENIKARGLILDDEKRAKDYKKAKQIIDKYHQFFIEEILSSVCISEDLLQNYSDVYFKLKKSDDDNLQKDFKSAKDTIKKQISEYIKDSEKFKNLFNQNLIDAKKGQESDLILWLKQSKDNGIELFKANSDITDIDEALEIIKSFKGWTTYFKGFHENRKNVYSSNDIPTSIIYRIVDDNLPKFLENKAKYESLKDKAPEAINYEQIKKDLAEELTFDIDYKTSEVNQRVFSLDEVFEIANFNNYLNQSGITKFNTIIGGKFVNGENTKRKGINEYINLYSQQINDKTLKKYKMSVLFKQILSDTESKSFVIDKLEDDSDVVTTMQSFYEQIAAFKTVEEKSIKETLSLLFDDLKAQKLDLSKIYFKNDKSLTDLSQQVFDDYSVIGTAVLEYITQQIAPKNLDNPSKKEQELIAKKTEKAKYLSLETIKLALEEFNKHRDIDKQCRFEEILANFAAIPMIFDEIAQNKDNLAQISIKYQNQGKKDLLQASAEDDVKAIKDLLDQTNNLLHKLKIFHISQSEDKANILDKDEHFYLVFEECYFELANIVPLYNKIRNYITQKPYSDEKFKLNFENSTLANGWDKNKEPDNTAILFIKDDKYYLGVMNKKNNKIFDDKAIKENKGEGYKKIVYKLLPGANKMLPKVFFSAKSIKFYNPSEDILRIRNHSTHTKNGSPQKGYEKFEFNIEDCRKFIDFYKQSISKHPEWKDFGFRFSDTQRYNSIDEFYREVENQGYKLTFENISESYIDSVVNQGKLYLFQIYNKDFSAYSKGRPNLHTLYWKALFDERNLQDVVYKLNGEAELFYRKQSIPKKITHPAKEAIANKNKDNPKKESVFEYDLIKDKRFTEDKFFFHCPITINFKSSGANKFNDEINLLLKEKANDVHILSIARGERHLAYYTLVDGKGNIIKQDTFNIIGNDRMKTNYHDKLAAIEKDRDSARKDWKKINNIKEMKEGYLSQVVHEIAKLVIEYNAIVVFEDLNFGFKRGRFKVEKQVYQKLEKMLIEKLNYLVFKDNEFDKTGGVLRAYQLTAPFETFKKMGKQTGIIYYVPAGFTSKICPVTGFVNQLYPKYESVSKSQEFFSKFDKICYNLDKGYFEFSFDYKNFGDKAAKGKWTIASFGSRLINFRNSDKNHNWDTREVYPTKELEKLLKDYSIEYGHGECIKAAICGESDKKFFAKLTSVLNTILQMRNSKTGTELDYLISPVADVNGNFFDSRQAPKNMPQDAAANGAYHIGLKGLMLLGRIKNNQEGKKLNLVIKNEEYFEFVQNRNN

SEQ ID NO: 89 - protein, 1300 aa, Francisella novicida
MSIYQEFVNKYSLSKTLRFELIPQGKTLENIKARGLILDDEKRAKDYKKAKQIIDKYHQFFIEEILSSVCISEDLLQNYSDVYFKLKKSDDDNLQKDFKSAKDTIKKQISEYIKDSEKFKNLFNQNLIDAKKGQESDLILWLKQSKDNGIELFKANSDITDIDEALEIIKSFKGWTTYFKGFHENRKNVYSSNDIPTSIIYRIVDDNLPKFLENKAKYESLKDKAPEAINYEQIKKDLAEELTFDIDYKTSEVNQRVFSLDEVFEIANFNNYLNQSGITKFNTIIGGKFVNGENTKRKGINEYINLYSQQINDKTLKKYKMSVLFKQILSDTESKSFVIDKLEDDSDVVTTMQSFYEQIAAFKTVEEKSIKETLSLLFDDLKAQKLDLSKIYFKNDKSLTDLSQQVFDDYSVIGTAVLEYITQQIAPKNLDNPSKKEQELIAKKTEKAKYLSLETIKLALEEFNKHRDIDKQCRFEEILANFAAIPMIFDEIAQNKDNLAQISIKYQNQGKKDLLQASAEDDVKAIKDLLDQTNNLLHKLKIFHISQSEDKANILDKDEHFYLVFEECYFELANIVPLYNKIRNYITQKPYSDEKFKLNFENSTLANGWDKNKEPDNTAILFIKDDKYYLGVMNKKNNKIFDDKAIKENKGEGYKKIVYKLLPGANKMLPKVFFSAKSIKFYNPSEDILRIRNHSTHTKNGSPQKGYEKFEFNIEDCRKFIDFYKQSISKHPEWKDFGFRFSDTQRYNSIDEFYREVENQGYKLTFENISESYIDSVVNQGKLYLFQIYNKDFSAYSKGRPNLHTLYWKALFDERNLQDVVYKLNGEAELFYRKQSIPKKITHPAKEAIANKNKDNPKKESVFEYDLIKDKRFTEDKFFFHCPITINFKSSGANKFNDEINLLLKEKANDVHILSIDRGERHLAYYTLVDGKGNIIKQDTFNIIGNDRMKTNYHDKLAAIEKDRDSARKDWKKINNIKEMKEGYLSQVVHEIAKLVIEYNAIVVFADLNFGFKRGRFKVEKQVYQKLEKMLIEKLNYLVFKDNEFDKTGGVLRAYQLTAPFETFKKMGKQTGIIYYVPAGFTSKICPVTGFVNQLYPKYESVSKSQEFFSKFDKICYNLDKGYFEFSFDYKNFGDKAAKGKWTIASFGSRLINFRNSDKNHNWDTREVYPTKELEKLLKDYSIEYGHGECIKAAICGESDKKFFAKLTSVLNTILQMRNSKTGTELDYLISPVADVNGNFFDSRQAPKNMPQDAAANGAYHIGLKGLMLLGRIKNNQEGKKLNLVIKNEEYFEFVQNRNN

SEQ ID NO: 90 - protein, 1300 aa, Francisella novicida
MSIYQEFVNKYSLSKTLRFELIPQGKTLENIKARGLILDDEKRAKDYKKAKQIIDKYHQFFIEEILSSVCISEDLLQNYSDVYFKLKKSDDDNLQKDFKSAKDTIKKQISEYIKDSEKFKNLFNQNLIDAKKGQESDLILWLKQSKDNGIELFKANSDITDIDEALEIIKSFKGWTTYFKGFHENRKNVYSSNDIPTSIIYRIVDDNLPKFLENKAKYESLKDKAPEAINYEQIKKDLAEELTFDIDYKTSEVNQRVFSLDEVFEIANFNNYLNQSGITKFNTIIGGKFVNGENTKRKGINEYINLYSQQINDKTLKKYKMSVLFKQILSDTESKSFVIDKLEDDSDVVTTMQSFYEQIAAFKTVEEKSIKETLSLLFDDLKAQKLDLSKIYFKNDKSLTDLSQQVFDDYSVIGTAVLEYITQQIAPKNLDNPSKKEQELIAKKTEKAKYLSLETIKLALEEFNKHRDIDKQCRFEEILANFAAIPMIFDEIAQNKDNLAQISIKYQNQGKKDLLQASAEDDVKAIKDLLDQTNNLLHKLKIFHISQSEDKANILDKDEHFYLVFEECYFELANIVPLYNKIRNYITQKPYSDEKFKLNFENSTLANGWDKNKEPDNTAILFIKDDKYYLGVMNKKNNKIFDDKAIKENKGEGYKKIVYKLLPGANKMLPKVFFSAKSIKFYNPSEDILRIRNHSTHTKNGSPQKGYEKFEFNIEDCRKFIDFYKQSISKHPEWKDFGFRFSDTQRYNSIDEFYREVENQGYKLTFENISESYIDSVVNQGKLYLFQIYNKDFSAYSKGRPNLHTLYWKALFDERNLQDVVYKLNGEAELFYRKQSIPKKITHPAKEAIANKNKDNPKKESVFEYDLIKDKRFTEDKFFFHCPITINFKSSGANKFNDEINLLLKEKANDVHILSIARGERHLAYYTLVDGKGNIIKQDTFNIIGNDRMKTNYHDKLAAIEKDRDSARKDWKKINNIKEMKEGYLSQVVHEIAKLVIEYNAIVVFADLNFGFKRGRFKVEKQVYQKLEKMLIEKLNYLVFKDNEFDKTGGVLRAYQLTAPFETFKKMGKQTGIIYYVPAGFTSKICPVTGFVNQLYPKYESVSKSQEFFSKFDKICYNLDKGYFEFSFDYKNFGDKAAKGKWTIASFGSRLINFRNSDKNHNWDTREVYPTKELEKLLKDYSIEYGHGECIKAAICGESDKKFFAKLTSVLNTILQMRNSKTGTELDYLISPVADVNGNFFDSRQAPKNMPQDAAANGAYHIGLKGLMLLGRIKNNQEGKKLNLVIKNEEYFEFVQNRNN

SEQ ID NO: 91 - DNA, 47 bp, Artificial Sequence
  Description of Artificial Sequence: Synthetic oligonucleotide
gggaaataagagagaaaagaagagtaagaagaaatataagagccacc

SEQ ID NO: 92 - DNA, 101 bp, Artificial Sequence
  Description of Artificial Sequence: Synthetic polynucleotide
gctggagcctcggtggccatgcttcttgccccttgggcctccccccagcccctcctccccttcctgcacccgtacccccgtggtctttgaataaagtctga

SEQ ID NO: 93 - DNA, 3420 bp, Bacillus hisashii
atggccccaaagaagaagcggaaggtcggtatccacggagtcccagcagccgccaccagatccttcatcctgaagatcgagcccaacgaggaagtgaagaaaggcctctggaaaacccacgaggtgctgaaccacggaatcgcctactacatgaatatcctgaagctgatccggcaagaggccatctacgagcaccacgagcaggaccccaagaatcccaagaaggtgtccaaggccgagatccaggccgagctgtgggatttcgtgctgaagatgcagaagtgcaacagcttcacacacgaggtggacaaggacgaggtgttcaacatcctgagagagctgtacgaggaactggtgcccagcagcgtggaaaagaagggcgaagccaaccagctgagcaacaagtttctgtaccctctggtggaccccaacagccagtctggaaagggaacagccagcagcggcagaaagcccagatggtacaacctgaagattgccggcgatccctcctgggaagaagagaagaagaagtgggaagaagataagaaaaaggacccgctggccaagatcctgggcaagctggctgagtacggactgatccctctgttcatcccctacaccgacagcaacgagcccatcgtgaaagaaatcaagtggatggaaaagtcccggaaccagagcgtgcggcggctggataaggacatgttcattcaggccctggaacggttcctgagctgggagagctggaacctgaaagtgaaagaggaatacgagaaggtcgagaaagagtacaagaccctggaagagaggatcaaagaggacatccaggctctgaaggctctggaacagtatgagaaagagcggcaagaacagctgctgcgggacaccctgaacaccaacgagtaccggctgagcaagagaggccttagaggctggcgggaaatcatccagaaatggctgaaaatggacgagaacgagccctccgagaagtacctggaagtgttcaaggactaccagcggaagcaccctagagaggccggcgattacagcgtgtacgagttcctgtccaagaaagagaaccacttcatctggcggaatcaccctgagtacccctacctgtacgccaccttctgcgagatcgacaagaaaaagaaggacgccaagcagcaggccaccttcacactggccgatcctatcaatcaccctctgtgggtccgattcgaggaaagaagcggcagcaacctgaacaagtacagaatcctgaccgagcagctgcacaccgagaagctgaagaaaaagctgacagtgcagctggaccggctgatctaccctacagaatctggcggctgggaagagaagggcaaagtggacattgtgctgctgcccagccggcagttctacaaccagatcttcctggacatcgaggaaaagggcaagcacgccttcacctacaaggatgagagcatcaagttccctctgaagggcacactcggcggagccagagtgcagttcgacagagatcacctgagaagataccctcacaaggtggaaagcggcaacgtgggcagaatctacttcaacatgaccgtgaacatcgagcctacagagtccccagtgtccaagtctctgaagatccaccgggacgacttccccaaggtggtcaacttcaagcccaaagaactgaccgagtggatcaaggacagcaagggcaagaaactgaagtccggcatcgagtccctggaaatcggcctgagagtgatgagcatcgacctgggacagagacaggccgctgccgcctctattttcgaggtggtggatcagaagcccgacatcgaaggcaagctgtttttcccaatcaagggcaccgagctgtatgccgtgcacagagccagcttcaacatcaagctgcccggcgagacactggtcaagagcagagaagtgctgcggaaggccagagaggacaatctgaaactgatgaaccagaagctcaacttcctgcggaacgtgctgcacttccagcagttcgaggacatcaccgagagagagaagcgggtcaccaagtggatcagcagacaagagaacagcgacgtgcccctggtgtaccaggatgagctgatccagatccgcgagctgatgtacaagccttacaaggactgggtcgccttcctgaagcagctccacaagagactggaagtcgagatcggcaaagaagtgaagcactggcggaagtccctgagcgacggaagaaagggcctgtacggcatctccctgaagaacatcgacgagatcgatcggacccggaagttcctgctgagatggtccctgaggcctaccgaacctggcgaagtgcgtagactggaacccggccagagattcgccatcgaccagctgaatcacctgaacgccctgaaagaagatcggctgaagaagatggccaacaccatcatcatgcacgccctgggctactgctacgacgtgcggaagaagaaatggcaggctaagaaccccgcctgccagatcatcctgttcgaggatctgagcaactacaacccctacgaggaaaggtcccgcttcgagaacagcaagctcatgaagtggtccagacgcgagatccccagacaggttgcactgcagggcgagatctatggcctgcaagtgggagaagtgggcgctcagttcagcagcagattccacgccaagacaggcagccctggcatcagatgtagcgtcgtgaccaaagagaagctgcaggacaatcggttcttcaagaatctgcagagagagggcagactgaccctggacaaaatcgccgtgctgaaagagggcgatctgtacccagacaaaggcggcgagaagttcatcagcctgagcaaggatcggaagtgcgtgaccacacacgccgacatcaacgccgctcagaacctgcagaagcggttctggacaagaacccacggcttctacaaggtgtactgcaaggcctaccaggtggacggccagaccgtgtacatccctgagagcaaggaccagaagcagaagatcatcgaagagttcggcgagggctacttcattctgaaggacggggtgtacgaatgggtcaacgccggcaagctgaaaatcaagaagggcagctccaagcagagcagcagcgagctggtggatagcgacatcctgaaagacagcttcgacctggcctccgagctgaaaggcgaaaagctgatgctgtacagggaccccagcggcaatgtgttccccagcgacaaatggatggccgctggcgtgttcttcggaaagctggaacgcatcctgatcagcaagctgaccaaccagtactccatcagcaccatcgaggacgacagcagcaagcagtctatgaaaaggccggcggccacgaaaaaggccggccaggcaaaaaagaaaaag

SEQ ID NO: 94 - protein, 1112 aa, Bacillus sp.
MAIRSIKLKMKTNSGTDSIYLRKALWRTHQLINEGIAYYMNLLTLYRQEAIGDKTKEAYQAELINIIRNQQRNNGSSEEHGSDQEILALLRQLYELIIPSSIGESGDANQLGNKFLYPLVDPNSQSGKGTSNAGRKPRWKRLKEEGNPDWELEKKKDEERKAKDPTVKIFDNLNKYGLLPLFPLFTNIQKDIEWLPLGKRQSVRKWDKDMFIQAIERLLSWESWNRRVADEYKQLKEKTESYYKEHLTGGEEWIEKIRKFEKERNMELEKNAFAPNDGYFITSRQIRGWDRVYEKWSKLPESASPEELWKVVAEQQNKMSEGFGDPKVFSFLANRENRDIWRGHSERIYHIAAYNGLQKKLSRTKEQATFTLPDAIEHPLWIRYESPGGTNLNLFKLEEKQKKNYYVTLSKIIWPSEEKWIEKENIEIPLAPSIQFNRQIKLKQHVKGKQEISFSDYSSRISLDGVLGGSRIQFNRKYIKNHKELLGEGDIGPVFFNLVVDVAPLQETRNGRLQSPIGKALKVISSDFSKVIDYKPKELMDWMNTGSASNSFGVASLLEGMRVMSIDMGQRTSASVSIFEVVKELPKDQEQKLFYSINDTELFAIHKRSFLLNLPGEVVTKNNKQQRQERRKKRQFVRSQIRMLANVLRLETKKTPDERKKAIHKLMEIVQSYDSWTASQKEVWEKELNLLTNMAAFNDEIWKESLVELHHRIEPYVGQIVSKWRKGLSEGRKNLAGISMWNIDELEDTRRLLISWSKRSRTPGEANRIETDEPFGSSLLQHIQNVKDDRLKQMANLIIMTALGFKYDKEEKDRYKRWKETYPACQIILFENLNRYLFNLDRSRRENSRLMKWAHRSIPRTVSMQGEMFGLQVGDVRSEYSSRFHAKTGAPGIRCHALTEEDLKAGSNTLKRLIEDGFINESELAYLKKGDIIPSQGGELFVTLSKRYKKDSDNNELTVIHADINAAQNLQKRFWQQNSEVYRVPCQLARMGEDKLYIPKSQTETIKKYFGKGSFVKNNTEQEVYKWEKSEKMKIKTDTTFDLQDLDGFEDISKTIELAQEQQKKYLTMFRDPSGYFFNNETWRPQKEYWSIVNNIIKSCLKKKILSNKVEL

SEQ ID NO: 95 - protein, 1108 aa, Bacillus thermoamylovorans
MATRSFILKIEPNEEVKKGLWKTHEVLNHGIAYYMNILKLIRQEAIYEHHEQDPKNPKKVSKAEIQAELWDFVLKMQKCNSFTHEVDKDVVFNILRELYEELVPSSVEKKGEANQLSNKFLYPLVDPNSQSGKGTASSGRKPRWYNLKIAGDPSWEEEKKKWEEDKKKDPLAKILGKLAEYGLIPLFIPFTDSNEPIVKEIKWMEKSRNQSVRRLDKDMFIQALERFLSWESWNLKVKEEYEKVEKEHKTLEERIKEDIQAFKSLEQYEKERQEQLLRDTLNTNEYRLSKRGLRGWREIIQKWLKMDENEPSEKYLEVFKDYQRKHPREAGDYSVYEFLSKKENHFIWRNHPEYPYLYATFCEIDKKKKDAKQQATFTLADPINHPLWVRFEERSGSNLNKYRILTEQLHTEKLKKKLTVQLDRLIYPTESGGWEEKGKVDIVLLPSRQFYNQIFLDIEEKGKHAFTYKDESIKFPLKGTLGGARVQFDRDHLRRYPHKVESGNVGRIYFNMTVNIEPTESPVSKSLKIHRDDFPKFVNFKPKELTEWIKDSKGKKLKSGIESLEIGLRVMSIDLGQRQAAAASIFEVVDQKPDIEGKLFFPIKGTELYAVHRASFNIKLPGETLVKSREVLRKAREDNLKLMNQKLNFLRNVLHFQQFEDITEREKRVTKWISRQENSDVPLVYQDELIQIRELMYKPYKDWVAFLKQLHKRLEVEIGKEVKHWRKSLSDGRKGLYGISLKNIDEIDRTRKFLLRWSLRPTEPGEVRRLEPGQRFAIDQLNHLNALKEDRLKKMANTIIMHALGYCYDVRKKKWQAKNPACQIILFEDLSNYNPYEERSRFENSKLMKWSRREIPRQVALQGEIYGLQVGEVGAQFSSRFHAKTGSPGIRCSVVTKEKLQDNRFFKNLQREGRLTLDKIAVLKEGDLYPDKGGEKFISLSKDRKLVTTHADINAAQNLQKRFWTRTHGFYKVYCKAYQVDGQTVYIPESKDQKQKIIEEFGEGYFILKDGVYEWGNAGKLKIKKGSSKQSSSELVDSDILKDSFDLASELKGEKLMLYRDPSGNVFPSDKWMAAGVFFGKLERILISKLTNQYSISTIEDDSSKQSM

SEQ ID NO: 96 - protein, 1302 aa, Unknown
  Description of Unknown: Cas12c1 sequence
MQTKKTHLHLISAKASRKYRRTIACLSDTAKKDLERRKQSGAADPAQELSCLKTIKFKLEVPEGSKLPSFDRISQIYNALETIEKGSLSYLLFALILSGFRIFPNSSAAKTFASSSCYKNDQFASQIKEIFGEMVKNFIPSELESILKKGRRKNNKDWTEENIKRVLNSEFGRKNSEGSSALFDSFLSKFSQELFRKFDSWNEVNKKYLEAAELLDSMLASYGPFDSVCKMIGDSDSRNSLPDKSTIAFTNNAEITVDIESSVMPYMAIAALLREYRQSKSKAAPVAYVQSHLTTTNGNGLSWFFKFGLDLIRKAPVSSKQSTSDGSKSLQELFSVPDDKLDGLKFIKEACEALPEASLLCGEKGELLGYQDFRTSFAGHIDSWVANYVNRLFELIELVNQLPESIKLPSILTQKNHNLVASLGLQEAEVSHSLELFEGLVKNVRQTLKKLAGIDISSSPNEQDIKEFYAFSDVLNRLGSIRNQIENAVQTAKKDKIDLESAIEWKEWKKLKKLPKLNGLGGGVPKQQELLDKALESVKQIRHYQRIDFERVIQWAVNEHCLETVPKFLVDAEKKKINKESSTDFAAKENAVRFLLEGIGAAARGKTDSVSKAAYNWFVVNNFLAKKDLNRYFINCQGCIYKPPYSKRRSLAFALRSDNKDTIEVVWEKFETFYKEISKEIEKFNIFSQEFQTFLHLENLRMKLLLRRIQKPIPAEIAFFSLPQEYYDSLPPNVAFLALNQEITPSEYITQFNLYSSFLNGNLILLRRSRSYLRAKFSWVGNSKLIYAAKEARLWKIPNAYWKSDEWKMILDSNVLVFDKAGNVLPAPTLKKVCEREGDLRLFYPLLRQLPHDWCYRNPFVKSVGREKNVIEVNKEGEPKVASALPGSLFRLIGPAPFKSLLDDCFFNPLDKDLRECMLIVDQEISQKVEAQKVEASLESCTYSIAVPIRYHLEEPKVSNQFENVLAIDQGEAGLAYAVFSLKSIGEAETKPIAVGTIRIPSIRRLIHSVSTYRKKKQRLQNFKQNYDSTAFIMRENVTGDVCAKIVGLMKEFNAFPVLEYDVKNLESGSRQLSAVYKAVNSHFLYFKEPGRDALRKQLWYGGDSWTIDGIEIVTRERKEDGKEGVEKIVPLKVFPGRSVSARFTSKTCSCCGRNVFDWLFTEKKAKTNKKFNVNSKGELTTADGVIQLFEADRSKGPKFYARRKERTPLTKPIAKGSYSLEEIERRVRTNLRRAPKSKQSRDTSQSQYFCVYKDCALHFSGMQADENAAINIGRRFLTALRKNRRSDFPSNVKISDRLLDN

SEQ ID NO: 97 - protein, 1218 aa, Unknown
  Description of Unknown: Cas12c2 sequence
MTKHSIPLHAFRNSGADARKWKGRIALLAKRGKETMRTLQFPLEMSEPEAAAINTTPFAVAYNAIEGTGKGTLFDYWAKLHLAGFRFFPSGGAATIFRQQAVFEDASWNAAFCQQSGKDWPWLVPSKLYERFTKAPREVAKKDGSKKSIEFTQENVANESHVSLVGASITDKTPEDQKEFFLKMAGALAEKFDSWKSANEDRIVAMKVIDEFLKSEGLHLPSLENIAVKCSVETKPDNATVAWHDAPMSGVQNLAIGVFATCASRIDNIYDLNGGKLSKLIQESATTPNVTALSWLFGKGLEYFRTTDIDTIMQDFNIPASAKESIKPLVESAQAIPTMTVLGKKNYAPFRPNFGGKIDSWIANYASRLMLLNDILEQIEPGFELPQALLDNETLMSGIDMTGDELKELIEAVYAWVDAAKQGLATLLGRGGNVDDAVQTFEQFSAMMDTLNGTLNTISARYVRAVEMAGKDEARLEKLIECKFDIPKWCKSVPKLVGISGGLPKVEEEIKVMNAAFKDVRARMFVRFEEIAAYVASKGAGMDVYDALEKRELEQIKKLKSAVPERAHIQAYRAVLHRIGRAVQNCSEKTKQLFSSKVIEMGVFKNPSHLNNFIFNQKGAIYRSPFDRSRHAPYQLHADKLLKNDWLELLAEISATLMASESTEQMEDALRLERTRLQLQLSGLPDWEYPASLAKPDIEVEIQTALKMQLAKDTVTSDVLQRAFNLYSSVLSGLTFKLLRRSFSLKMRFSVADTTQLIYVPKVCDWAIPKQYLQAEGEIGIAARVVTESSPAKMVTEVEMKEPKALGHFMQQAPHDWYFDASLGGTQVAGRIVEKGKEVGKERKLVGYRMRGNSAYKTVLDKSLVGNTELSQCSMIIEIPYTQTVDADFRAQVQAGLPKVSINLPVKETITASNKDEQMLFDRFVAIDLGERGLGYAVFDAKTLELQESGHRPIKAITNLLNRTHHYEQRPNQRQKFQAKFNVNLSELRENTVGDVCHQINRICAYYNAFPVLEYMVPDRLDKQLKSVYESVTNRYIWSSTDAHKSARVQFWLGGETWEHPYLKSAKDKKPLVLSPGRGASGKGTSQTCSCCGRNPFDLIKDMKPRAKIAVVDGKAKLENSELKLFERNLESKDDMLARRHRNERAGMEQPLTPGNYTVDEIKALLRANLRRAPKNRRTKDTTVSEYHCVFSDCGKTMHADENAAVNIGGKFIADIEK

SEQ ID NO: 98 - protein, 1252 aa, Oleiphilus sp.
MTKLRHRQKKLTHDWAGSKKREVLGSNGKLQNPLLMPVKKGQVTEFRKAFSAYARATKGEMTDGRKNMFTHSFEPFKTKPSLHQCELADKAYQSLHSYLPGSLAHFLLSAHALGFRIFSKSGEATAFQASSKIEAYESKLASELACVDLSIQNLTISTLFNALTTSVRGKGEETSADPLIARFYTLLTGKPLSRDTQGPERDLAEVISRKIASSFGTWKEMTANPLQSLQFFEEELHALDANVSLSPAFDVLIKMNDLQGDLKNRTIVFDPDAPVFEYNAEDPADIIIKLTARYAKEAVIKNQNVGNYVKNAITTTNANGLGWLLNKGLSLLPVSTDDELLEFIGVERSHPSCHALIELIAQLEAPELFEKNVFSDTRSEVQGMIDSAVSNHIARLSSSRNSLSMDSEELERLIKSFQIHTPHCSLFIGAQSLSQQLESLPEALQSGVNSADILLGSTQYMLTNSLVEESIATYQRTLNRINYLSGVAGQINGAIKRKAIDGEKIHLPAAWSELISLPFIGQPVIDVESDLAHLKNQYQTLSNEFDTLISALQKNFDLNFNKALLNRTQHFEAMCRSTKKNALSKPEIVSYRDLLARLTSCLYRGSLVLRRAGIEVLKKHKIFESNSELREHVHERKHFVFVSPLDRKAKKLLRLTDSRPDLLHVIDEILQHDNLENKDRESLWLVRSGYLLAGLPDQLSSSFINLPIITQKGDRRLIDLIQYDQINRDAFVMLVTSAFKSNLSGLQYRANKQSFVVTRTLSPYLGSKLVYVPKDKDWLVPSQMFEGRFADILQSDYMVWKDAGRLCVIDTAKHLSNIKKSVFSSEEVLAFLRELPHRTFIQTEVRGLGVNVDGIAFNNGDIPSLKTFSNCVQVKVSRTNTSLVQTLNRWFEGGKVSPPSIQFERAYYKKDDQIHEDAAKRKIRFQMPATELVHASDDAGWTPSYLLGIDPGEYGMGLSLVSINNGEVLDSGFIHINSLINFASKKSNHQTKVVPRQQYKSPYANYLEQSKDSAAGDIAHILDRLIYKLNALPVFEALSGNSQSAADQVWTKVLSFYTWGDNDAQNSIRKQHWFGASHWDIKGMLRQPPTEKKPKPYIAFPGSQVSSYGNSQRCSCCGRNPIEQLREMAKDTSIKELKIRNSEIQLFDGTIKLFNPDPSTVIERRRHNLGPSRIPVADRTFKNISPSSLEFKELITIVSRSIRHSPEFIAKKRGIGSEYFCAYSDCNSSLNSEANAAANVAQKFQKQLFFEL

SEQ ID NO: 99 - protein, 767 aa, Unknown
  Description of Unknown: Cas12g1 sequence
MAQASSTPAVSPRPRPRYREERTLVRKLLPRPGQSKQEFRENVKKLRKAFLQFNADVSGVCQWAIQFRPRYGKPAEPTETFWKFFLEPETSLPPNDSRSPEFRRLQAFEAAAGINGAAALDDPAFTNELRDSILAVASRPKTKEAQRLFSRLKDYQPAHRMILAKVAAEWIESRYRRAHQNWERNYEEWKKEKQEWEQNHPELTPEIREAFNQIFQQLEVKEKRVRICPAARLLQNKDNCQYAGKNKHSVLCNQFNEFKKNHLQGKAIKFFYKDAEKYLRCGLQSLKPNVQGPFREDWNKYLRYMNLKEETLRGKNGGRLPHCKNLGQECEFNPHTALCKQYQQQLSSRPDLVQHDELYRKWRREYWREPRKPVFRYPSVKRHSIAKIFGENYFQADFKNSVVGLRLDSMPAGQYLEFAFAPWPRNYRPQPGETEISSVHLHFVGTRPRIGFRFRVPHKRSRFDCTQEELDELRSRTFPRKAQDQKFLEAARKRLLETFPGNAEQELRLLAVDLGTDSARAAFFIGKTFQQAFPLKIVKIEKLYEQWPNQKQAGDRRDASSKQPRPGLSRDHVGRHLQKMRAQASEIAQKRQELTGTPAPETTTDQAAKKATLQPFDLRGLTVHTARMIRDWARLNARQIIQLAEENQVDLIVLESLRGFRPPGYENLDQEKKRRVAFFAHGRIRRKVTEKAVERGMRVVTVPYLASSKVCAECRKKQKDNKQWEKNKKRGLFKCEGCGSQAQVDENAARVLGRVFWGEIELPTAIP

SEQ ID NO: 100 - protein, 870 aa, Unknown
  Description of Unknown: Cas12h1 sequence
MKVHEIPRSQLLKIKQYEGSFVEWYRDLQEDRKKFASLLFRWAAFGYAAREDDGATYISPSQALLERRLLLGDAEDVAIKFLDVLFKGGAPSSSCYSLFYEDFALRDKAKYSGAKREFIEGLATMPLDKIIERIRQDEQLSKIPAEEWLILGAEYSPEEIWEQVAPRIVNVDRSLGKQLRERLGIKCRRPHDAGYCKILMEVVARQLRSHNETYHEYLNQTHEMKTKVANNLTNEFDLVCEFAEVLEEKNYGLGWYVLWQGVKQALKEQKKPTKIQIAVDQLRQPKFAGLLTAKWRALKGAYDTWKLKKRLEKRKAFPYMPNWDNDYQIPVGLTGLGVFTLEVKRTEVVVDLKEHGKLFCSHSHYFGDLTAEKHPSRYHLKFRHKLKLRKRDSRVEPTIGPWIEAALREITIQKKPNGVFYLGLPYALSHGIDNFQIAKRFFSAAKPDKEVINGLPSEMVVGAADLNLSNIVAPVKARIGKGLEGPLHALDYGYGELIDGPKILTPDGPRCGELISLKRDIVEIKSAIKEFKACQREGLTMSEETTTWLSEVESPSDSPRCMIQSRIADTSRRLNSFKYQMNKEGYQDLAEALRLLDAMDSYNSLLESYQRMHLSPGEQSPKEAKFDTKRASFRDLLRRRVAHTIVEYFDDCDIVFFEDLDGPSDSDSRNNALVKLLSPRTLLLYIRQALEKRGIGMVEVAKDGTSQNNPISGHVGWRNKQNKSEIYFYEDKELLVMDADEVGAMNILCRGLNHSVCPYSFVTKAPEKKNDEKKEGDYGKRVKRFLKDRYGSSNVRFLVASMGFVTVTTKRPKDALVGKRLYYHGGELVTHDLHNRMKDEIKYLVEKEVLARRVSLSDSTIKSYKSFAHV

SEQ ID NO: 101 - protein, 1093 aa, Unknown
  Description of Unknown: Cas12i1 sequence
MSNKEKNASETRKAYTTKMIPRSHDRMKLLGNFMDYLMDGTPIFFELWNQFGGGIDRDIISGTANKDKISDDLLLAVNWFKVMPINSKPQGVSPSNLANLFQQYSGSEPDIQAQEYFASNFDTEKHQWKDMRVEYERLLAELQLSRSDMHHDLKLMYKEKCIGLSLSTAHYITSVMFGTGAKNNRQTKHQFYSKVIQLLEESTQINSVEQLASIILKAGDCDSYRKLRIRCSRKGATPSILKIVQDYELGTNHDDEVNVPSLIANLKEKLGRFEYECEWKCMEKIKAFLASKVGPYYLGSYSAMLENALSPIKGMTTKNCKFVLKQIDAKNDIKYENEPFGKIVEGFFDSPYFESDTNVKWVLHPHHIGESNIKTLWEDLNAIHSKYEEDIASLSEDKKEKRIKVYQGDVCQTINTYCEEVGKEAKTPLVQLLRYLYSRKDDIAVDKIIDGITFLSKKHKVEKQKINPVIQKYPSFNFGNNSKLLGKIISPKDKLKHNLKCNRNQVDNYIWIEIKVLNTKTMRWEKHHYALSSTRFLEEVYYPATSENPPDALAARFRTKTNGYEGKPALSAEQIEQIRSAPVGLRKVKKRQMRLEAARQQNLLPRYTWGKDFNINICKRGNNFEVTLATKVKKKKEKNYKVVLGYDANIVRKNTYAAIEAHANGDGVIDYNDLPVKPIESGFVTVESQVRDKSYDQLSYNGVKLLYCKPHVESRRSFLEKYRNGTMKDNRGNNIQIDFMKDFEAIADDETSLYYFNMKYCKLLQSSIRNHSSQAKEYREEIFELLRDGKLSVLKLSSLSNLSFVMFKVAKSLIGTYFGHLLKKPKNSKSDVKAPPITDEDKQKADPEMFALRLALEEKRLNKVKSKKEVIANKIVAKALELRDKYGPVLIKGENISDTTKKGKKSSTNSFLMDWLARGVANKVKEMVMMHQGLEFVEVNPNFTSHQDPFVHKNPENTFRARYSRCTPSELTEKNRKEILSFLSDKPSKRPTNAYYNEGAMAFLATYGLKKNDVLGVSLEKFKQIMANILHQRSEDQLLFPSRGGMFYLATYKLDADATSVNWNGKQFWVCNADLVAAYNVGLVDIQKDFKKK

SEQ ID NO: 102 - protein, 1054 aa, Unknown
  Description of Unknown: Cas12i2 sequence
MSSAIKSYKSVLRPNERKNQLLKSTIQCLEDGSAFFFKMLQGLFGGITPEIVRFSTEQEKQQQDIALWCAVNWFRPVSQDSLTHTIASDNLVEKFEEYYGGTASDAIKQYFSASIGESYYWNDCRQQYYDLCRELGVEVSDLTHDLEILCREKCLAVATESNQNNSIISVLFGTGEKEDRSVKLRITKKILEAISNLKEIPKNVAPIQEIILNVAKATKETFRQVYAGNLGAPSTLEKFIAKDGQKEFDLKKLQTDLKKVIRGKSKERDWCCQEELRSYVEQNTIQYDLWAWGEMFNKAHTALKIKSTRNYNFAKQRLEQFKEIQSLNNLLVVKKLNDFFDSEFFSGEETYTICVHHLGGKDLSKLYKAWEDDPADPENAIVVLCDDLKNNFKKEPIRNILRYIFTIRQECSAQDILAAAKYNQQLDRYKSQKANPSVLGNQGFTWTNAVILPEKAQRNDRPNSLDLRIWLYLKLRHPDGRWKKHHIPFYDTRFFQEIYAAGNSPVDTCQFRTPRFGYHLPKLTDQTAIRVNKKHVKAAKTEARIRLAIQQGTLPVSNLKITEISATINSKGQVRIPVKFDVGRQKGTLQIGDRFCGYDQNQTASHAYSLWEVVKEGQYHKELGCFVRFISSGDIVSITENRGNQFDQLSYEGLAYPQYADWRKKASKFVSLWQITKKNKKKEIVTVEAKEKFDAICKYQPRLYKFNKEYAYLLRDIVRGKSLVELQQIRQEIFRFIEQDCGVTRLGSLSLSTLETVKAVKGIIYSYFSTALNASKNNPISDEQRKEFDPELFALLEKLELIRTRKKKQKVERIANSLIQTCLENNIKFIRGEGDLSTTNNATKKKANSRSMDWLARGVFNKIRQLAPMHNITLFGCGSLYTSHQDPLVHRNPDKAMKCRWAAIPVKDIGDWVLRKLSQNLRAKNIGTGEYYHQGVKEFLSHYELQDLEEELLKWRSDRKSNIPCWVLQNRLAEKLGNKEAVVYIPVRGGRIYFATHKVATGAVSIVFDQKQVWVCNADHVAAANIALTVKGIGEQSSDEENPDGSRIKLQLTS

SEQ ID NO: 103 - protein, 6 aa, Artificial Sequence
  Description of Artificial Sequence: Synthetic peptide
GGSGGS

SEQ ID NO: 104 - DNA, 4092 bp, Artificial Sequence
  Description of Artificial Sequence: Synthetic polynucleotide
gccaccatggccccaaagaagaagcggaaggtcggtatccacggagtcccagcagccgccaccagatccttcatcctgaagatcgagcccaacgaggaagtgaagaaaggcctctggaaaacccacgaggtgctgaaccacggaatcgcctactacatgaatatcctgaagctgatccggcaagaggccatctacgagcaccacgagcaggaccccaagaatcccaagaaggtgtccaaggccgagatccaggccgagctgtgggatttcgtgctgaagatgcagaagtgcaacagcttcacacacgaggtggacaaggacgaggtgttcaacatcctgagagagctgtacgaggaactggtgcccagcagcgtggaaaagaagggcgaagccaaccagctgagcaacaagtttctgtaccctctggtggaccccaacagccagtctggaaagggaacagccagcagcggcagaaagcccagatggtacaacctgaagattgccggcgatcccggaggctctggaggaagctccgaagtcgagttttcccatgagtactggatgagacacgcattgactctcgcaaagagggctcgagatgaacgcgaggtgcccgtgggggcagtactcgtgctcaacaatcgcgtaatcggcgaaggttggaatagggcaatcggactccacgaccccactgcacatgcggaaatcatggcccttcgacagggagggcttgtgatgcagaattatcgactttatgatgcgacgctgtacgtcacgtttgaaccttgcgtaatgtgcgcgggagctatgattcactcccgcattggacgagttgtattcggtgttcgcaacgccaagacgggtgccgcaggttcactgatggacgtgctgcatcatccaggcatgaaccaccgggtagaaatcacagaaggcatattggcggacgaatgtgcggcgctgttgtgtcgtttttttcgcatgcccaggcgggtctttaacgcccagaaaaaagcacaatcctctactgacggctcttctggatctgaaacacctggcacaagcgagagcgccacccctgagagctctggctcctgggaagaagagaagaagaagtgggaagaagataagaaaaaggacccgctggccaagatcctgggcaagctggctgagtacggactgatccctctgttcatcccctacaccgacagcaacgagcccatcgtgaaagaaatcaagtggatggaaaagtcccggaaccagagcgtgcggcggctggataaggacatgttcattcaggccctggaacggttcctgagctgggagagctggaacctgaaagtgaaagaggaatacgagaaggtcgagaaagagtacaagaccctggaagagaggatcaaagaggacatccaggctctgaaggctctggaacagtatgagaaagagcggcaagaacagctgctgcgggacaccctgaacaccaacgagtaccggctgagcaagagaggccttagaggctggcgggaaatcatccagaaatggctgaaaatggacgagaacgagccctccgagaagtacctggaagtgttcaaggactaccagcggaagcaccctagagaggccggcgattacagcgtgtacgagttcctgtccaagaaagagaaccacttcatctggcggaatcaccctgagtacccctacctgtacgccaccttctgcgagatcgacaagaaaaagaaggacgccaagcagcaggccaccttcacactggccgatcctatcaatcaccctctgtgggtccgattcgaggaaagaagcggcagcaacctgaacaagtacagaatcctgaccgagcagctgcacaccgagaagctgaagaaaaagctgacagtgcagctggaccggctgatctaccctacagaatctggcggctgggaagagaagggcaaagtggacattgtgctgctgcccagccggcagttctacaaccagatcttcctggacatcgaggaaaagggcaagcacgccttcacctacaaggatgagagcatcaagttccctctgaagggcacactcggcggagccagagtgcagttcgacagagatcacctgagaagataccctcacaaggtggaaagcggcaacgtgggcagaatctacttcaacatgaccgtgaacatcgagcctacagagtccccagtgtccaagtctctgaagatccaccgggacgacttccccaaggtggtcaacttcaagcccaaagaactgaccgagtggatcaaggacagcaagggcaagaaactgaagtccggcatcgagtccctggaaatcggcctgagagtgatgagcatcgacctgggacagagacaggccgctgccgcctctattttcgaggtggtggatcagaagcccgacatcgaaggcaagctgtttttcccaatcaagggcaccgagctgtatgccgtgcacagagccagcttcaacatcaagctgcccggcgagacactggtcaagagcagagaagtgctgcggaaggccagagaggacaatctgaaactgatgaaccagaagctcaacttcctgcggaacgtgctgcacttccagcagttcgaggacatcaccgagagagagaagcgggtcaccaagtggatcagcagacaagagaacagcgacgtgcccctggtgtaccaggatgagctgatccagatccgcgagctgatgtacaagccttacaaggactgggtcgccttcctgaagcagctccacaagagactggaagtcgagatcggcaaagaagtgaagcactggcggaagtccctgagcgacggaagaaagggcctgtacggcatctccctgaagaacatcgacgagatcgatcggacccggaagttcctgctgagatggtccctgaggcctaccgaacctggcgaagtgcgtagactggaacccggccagagattcgccatcgaccagctgaatcacctgaacgccctgaaagaagatcggctgaagaagatggccaacaccatcatcatgcacgccctgggctactgctacgacgtgcggaagaagaaatggcaggctaagaaccccgcctgccagatcatcctgttcgaggatctgagcaactacaacccctacgaggaaaggtcccgcttcgagaacagcaagctcatgaagtggtccagacgcgagatccccagacaggttgcactgcagggcgagatctatggcctgcaagtgggagaagtgggcgctcagttcagcagcagattccacgccaagacaggcagccctggcatcagatgtagcgtcgtgaccaaagagaagctgcaggacaatcggttcttcaagaatctgcagagagagggcagactgaccctggacaaaatcgccgtgctgaaagagggcgatctgtacccagacaaaggcggcgagaagttcatcagcctgagcaaggatcggaagtgcgtgaccacacacgccgacatcaacgccgctcagaacctgcagaagcggttctggacaagaacccacggcttctacaaggtgtactgcaaggcctaccaggtggacggccagaccgtgtacatccctgagagcaaggaccagaagcagaagatcatcgaagagttcggcgagggctacttcattctgaaggacggggtgtacgaatgggtcaacgccggcaagctgaaaatcaagaagggcagctccaagcagagcagcagcgagctggtggatagcgacatcctgaaagacagcttcgacctggcctccgagctgaaaggcgaaaagctgatgctgtacagggaccccagcggcaatgtgttccccagcgacaaatggatggccgctggcgtgttcttcggaaagctggaacgcatcctgatcagcaagctgaccaaccagtactccatcagcaccatcgaggacgacagcagcaagcagtctatgaaaaggccggcggccacgaaaaaggccggccaggcaaaaaagaaaaagggatcctacccatacgatgttccagattacgcttatccctacgacgtgcctgattatgcatacccatatgatgtccccgactatgcctaa

SEQ ID NO: 105 - protein, 1361 aa, Artificial Sequence
  Description of Artificial Sequence: Synthetic polypeptide
MAPKKKRKVGIHGVPAAATRSFILKIEPNEEVKKGLWKTHEVLNHGIAYYMNILKLIRQEAIYEHHEQDPKNPKKVSKAEIQAELWDFVLKMQKCNSFTHEVDKDEVFNILRELYEELVPSSVEKKGEANQLSNKFLYPLVDPNSQSGKGTASSGRKPRWYNLKIAGDPGGSGGSSEVEFSHEYWMRHALTLAKRARDEREVPVGAVLVLNNRVIGEGWNRAIGLHDPTAHAEIMALRQGGLVMQNYRLYDATLYVTFEPCVMCAGAMIHSRIGRVVFGVRNAKTGAAGSLMDVLHHPGMNHRVEITEGILADECAALLCRFFRMPRRVFNAQKKAQSSTDGSSGSETPGTSESATPESSGSWEEEKKKWEEDKKKDPLAKILGKLAEYGLIPLFIPYTDSNEPIVKEIKWMEKSRNQSVRRLDKDMFIQALERFLSWESWNLKVKEEYEKVEKEYKTLEERIKEDIQALKALEQYEKERQEQLLRDTLNTNEYRLSKRGLRGWREIIQKWLKMDENEPSEKYLEVFKDYQRKHPREAGDYSVYEFLSKKENHFIWRNHPEYPYLYATFCEIDKKKKDAKQQATFTLADPINHPLWVRFEERSGSNLNKYRILTEQLHTEKLKKKLTVQLDRLIYPTESGGWEEKGKVDIVLLPSRQFYNQIFLDIEEKGKHAFTYKDESIKFPLKGTLGGARVQFDRDHLRRYPHKVESGNVGRIYFNMTVNIEPTESPVSKSLKIHRDDFPKVVNFKPKELTEWIKDSKGKKLKSGIESLEIGLRVMSIDLGQRQAAAASIFEVVDQKPDIEGKLFFPIKGTELYAVHRASFNIKLPGETLVKSREVLRKAREDNLKLMNQKLNFLRNVLHFQQFEDITEREKRVTKWISRQENSDVPLVYQDELIQIRELMYKPYKDWVAFLKQLHKRLEVEIGKEVKHWRKSLSDGRKGLYGISLKNIDEIDRTRKFLLRWSLRPTEPGEVRRLEPGQRFAIDQLNHLNALKEDRLKKMANTIIMHALGYCYDVRKKKWQAKNPACQIILFEDLSNYNPYEERSRFENSKLMKWSRREIPRQVALQGEIYGLQVGEVGAQFSSRFHAKTGSPGIRCSVVTKEKLQDNRFFKNLQREGRLTLDKIAVLKEGDLYPDKGGEKFISLSKDRKCVTTHADINAAQNLQKRFWTRTHGFYKVYCKAYQVDGQTVYIPESKDQKQKIIEEFGEGYFILKDGVYEWVNAGKLKIKKGSSKQSSSELVDSDILKDSFDLASELKGEKLMLYRDPSGNVFPSDKWMAAGVFFGKLERILISKLTNQYSISTIEDDSSKQSMKRPAATKKAGQAKKKKGSYPYDVPDYAYPYDVPDYAYPYDVPDYA

SEQ ID NO: 106 - DNA, 4092 bp, Artificial Sequence
  Description of Artificial Sequence: Synthetic polynucleotide
gccaccatggccccaaagaagaagcggaaggtcggtatccacggagtcccagcagccgccaccagatccttcatcctgaagatcgagcccaacgaggaagtgaagaaaggcctctggaaaacccacgaggtgctgaaccacggaatcgcctactacatgaatatcctgaagctgatccggcaagaggccatctacgagcaccacgagcaggaccccaagaatcccaagaaggtgtccaaggccgagatccaggccgagctgtgggatttcgtgctgaagatgcagaagtgcaacagcttcacacacgaggtggacaaggacgaggtgttcaacatcctgagagagctgtacgaggaactggtgcccagcagcgtggaaaagaagggcgaagccaaccagctgagcaacaagtttctgtaccctctggtggaccccaacagccagtctggaaagggaacagccagcagcggcagaaagcccagatggtacaacctgaagattgccggcgatccctcctgggaagaagagaagaagaagtgggaagaagataagaaaaaggacccgctggccaagatcctgggcaagctggctgagtacggactgatccctctgttcatcccctacaccgacagcaacgagcccatcgtgaaagaaatcaagtggatggaaaagtcccggaaccagagcgtgcggcggctggataaggacatgttcattcaggccctggaacggttcctgagctgggagagctggaacctgaaagtgaaagaggaatacgagaaggtcgagaaagagtacaagaccctggaagagaggatcaaaggaggctctggaggaagctccgaagtcgagttttcccatgagtactggatgagacacgcattgactctcgcaaagagggctcgagatgaacgcgaggtgcccgtgggggcagtactcgtgctcaacaatcgcgtaatcggcgaaggttggaatagggcaatcggactccacgaccccactgcacatgcggaaatcatggcccttcgacagggagggcttgtgatgcagaattatcgactttatgatgcgacgctgtacgtcacgtttgaaccttgcgtaatgtgcgcgggagctatgattcactcccgcattggacgagttgtattcggtgttcgcaacgccaagacgggtgccgcaggttcactgatggacgtgctgcatcatccaggcatgaaccaccgggtagaaatcacagaaggcatattggcggacgaatgtgcggcgctgttgtgtcgtttttttcgcatgcccaggcgggtctttaacgcccagaaaaaagcacaatcctctactgacggctcttctggatctgaaacacctggcacaagcgagagcgccacccctgagagctctggcgaggacatccaggctctgaaggctctggaacagtatgagaaagagcggcaagaacagctgctgcgggacaccctgaacaccaacgagtaccggctgagcaagagaggccttagaggctggcgggaaatcatccagaaatggctgaaaatggacgagaacgagccctccgagaagtacctggaagtgttcaaggactaccagcggaagcaccctagagaggccggcgattacagcgtgtacgagttcctgtccaagaaagagaaccacttcatctggcggaatcaccctgagtacccctacctgtacgccaccttctgcgagatcgacaagaaaaagaaggacgccaagcagcaggccaccttcacactggccgatcctatcaatcaccctctgtgggtccgattcgaggaaagaagcggcagcaacctgaacaagtacagaatcctgaccgagcagctgcacaccgagaagctgaagaaaaagctgacagtgcagctggaccggctgatctaccctacagaatctggcggctgggaagagaagggcaaagtggacattgtgctgctgcccagccggcagttctacaaccagatcttcctggacatcgaggaaaagggcaagcacgccttcacctacaaggatgagagcatcaagttccctctgaagggcacactcggcggagccagagtgcagttcgacagagatcacctgagaagataccctcacaaggtggaaagcggcaacgtgggcagaatctacttcaacatgaccgtgaacatcgagcctacagagtccccagtgtccaagtctctgaagatccaccgggacgacttccccaaggtggtcaacttcaagcccaaagaactgaccgagtggatcaaggacagcaagggcaagaaactgaagtccggcatcgagtccctggaaatcggcctgagagtgatgagcatcgacctgggacagagacaggccgctgccgcctctattttcgaggtggtggatcagaagcccgacatcgaaggcaagctgtttttcccaatcaagggcaccgagctgtatgccgtgcacagagccagcttcaacatcaagctgcccggcgagacactggtcaagagcagagaagtgctgcggaaggccagagaggacaatctgaaactgatgaaccagaagctcaacttcctgcggaacgtgctgcacttccagcagttcgaggacatcaccgagagagagaagcgggtcaccaagtggatcagcagacaagagaacagcgacgtgcccctggtgtaccaggatgagctgatccagatccgcgagctgatgtacaagccttacaaggactgggtcgccttcctgaagcagctccacaagagactggaagtcgagatcggcaaagaagtgaagcactggcggaagtccctgagcgacggaagaaagggcctgtacggcatctccctgaagaacatcgacgagatcgatcggacccggaagttcctgctgagatggtccctgaggcctaccgaacctggcgaagtgcgtagactggaacccggccagagattcgccatcgaccagctgaatcacctgaacgccctgaaagaagatcggctgaagaagatggccaacaccatcatcatgcacgccctgggctactgctacgacgtgcggaagaagaaatggcaggctaagaaccccgcctgccagatcatcctgttcgaggatctgagcaactacaacccctacgaggaaaggtcccgcttcgagaacagcaagctcatgaagtggtccagacgcgagatccccagacaggttgcactgcagggcgagatctatggcctgcaagtgggagaagtgggcgctcagttcagcagcagattccacgccaagacaggcagccctggcatcagatgtagcgtcgtgaccaaagagaagctgcaggacaatcggttcttcaagaatctgcagagagagggcagactgaccctggacaaaatcgccgtgctgaaagagggcgatctgtacccagacaaaggcggcgagaagttcatcagcctgagcaaggatcggaagtgcgtgaccacacacgccgacatcaacgccgctcagaacctgcagaagcggttctggacaagaacccacggcttctacaaggtgtactgcaaggcctaccaggtggacggccagaccgtgtacatccctgagagcaaggaccagaagcagaagatcatcgaagagttcggcgagggctacttcattctgaaggacggggtgtacgaatgggtcaacgccggcaagctgaaaatcaagaagggcagctccaagcagagcagcagcgagctggtggatagcgacatcctgaaagacagcttcgacctggcctccgagctgaaaggcgaaaagctgatgctgtacagggaccccagcggcaatgtgttccccagcgacaaatggatggccgctggcgtgttcttcggaaagctggaacgcatcctgatcagcaagctgaccaaccagtactccatcagcaccatcgaggacgacagcagcaagcagtctatgaaaaggccggcggccacgaaaaaggccggccaggcaaaaaagaaaaagggatcctacccatacgatgttccagattacgcttatccctacgacgtgcctgattatgcatacccatatgatgtccccgactatgcctaa

SEQ ID NO: 107 - protein, 1361 aa, Artificial Sequence
  Description of Artificial Sequence: Synthetic polypeptide
MAPKKKRKVGIHGVPAAATRSFILKIEPNEEVKKGLWKTHEVLNHGIAYYMNILKLIRQEAIYEHHEQDPKNPKKVSKAEIQAELWDFVLKMQKCNSFTHEVDKDEVFNILRELYEELVPSSVEKKGEANQLSNKFLYPLVDPNSQSGKGTASSGRKPRWYNLKIAGDPSWEEEKKKWEEDKKKDPLAKILGKLAEYGLIPLFIPYTDSNEPIVKEIKWMEKSRNQSVRRLDKDMFIQALERFLSWESWNLKVKEEYEKVEKEYKTLEERIKGGSGGSSEVEFSHEYWMRHALTLAKRARDEREVPVGAVLVLNNRVIGEGWNRAIGLHDPTAHAEIMALRQGGLVMQNYRLYDATLYVTFEPCVMCAGAMIHSRIGRVVFGVRNAKTGAAGSLMDVLHHPGMNHRVEITEGILADECAALLCRFFRMPRRVFNAQKKAQSSTDGSSGSETPGTSESATPESSGEDIQALKALEQYEKERQEQLLRDTLNTNEYRLSKRGLRGWREIIQKWLKMDENEPSEKYLEVFKDYQRKHPREAGDYSVYEFLSKKENHFIWRNHPEYPYLYATFCEIDKKKKDAKQQATFTLADPINHPLWVRFEERSGSNLNKYRILTEQLHTEKLKKKLTVQLDRLIYPTESGGWEEKGKVDIVLLPSRQFYNQIFLDIEEKGKHAFTYKDESIKFPLKGTLGGARVQFDRDHLRRYPHKVESGNVGRIYFNMTVNIEPTESPVSKSLKIHRDDFPKVVNFKPKELTEWIKDSKGKKLKSGIESLEIGLRVMSIDLGQRQAAAASIFEVVDQKPDIEGKLFFPIKGTELYAVHRASFNIKLPGETLVKSREVLRKAREDNLKLMNQKLNFLRNVLHFQQFEDITEREKRVTKWISRQENSDVPLVYQDELIQIRELMYKPYKDWVAFLKQLHKRLEVEIGKEVKHWRKSLSDGRKGLYGISLKNIDEIDRTRKFLLRWSLRPTEPGEVRRLEPGQRFAIDQLNHLNALKEDRLKKMANTIIMHALGYCYDVRKKKWQAKNPACQIILFEDLSNYNPYEERSRFENSKLMKWSRREIPRQVALQGEIYGLQVGEVGAQFSSRFHAKTGSPGIRCSVVTKEKLQDNRFFKNLQREGRLTLDKIAVLKEGDLYPDKGGEKFISLSKDRKCVTTHADINAAQNLQKRFWTRTHGFYKVYCKAYQVDGQTVYIPESKDQKQKIIEEFGEGYFILKDGVYEWVNAGKLKIKKGSSKQSSSELVDSDILKDSFDLASELKGEKLMLYRDPSGNVFPSDKWMAAGVFFGKLERILISKLTNQYSISTIEDDSSKQSMKRPAATKKAGQAKKKKGSYPYDVPDYAYPYDVPDYAYPYDVPDYA

SEQ ID NO: 108 - DNA, 4092 bp, Artificial Sequence
  Description of Artificial Sequence: Synthetic polynucleotide
gccaccatggccccaaagaagaagcggaaggtcggtatccacggagtcccagcagccgccaccagatccttcatcctgaagatcgagcccaacgaggaagtgaagaaaggcctctggaaaacccacgaggtgctgaaccacggaatcgcctactacatgaatatcctgaagctgatccggcaagaggccatctacgagcaccacgagcaggaccccaagaatcccaagaaggtgtccaaggccgagatccaggccgagctgtgggatttcgtgctgaagatgcagaagtgcaacagcttcacacacgaggtggacaaggacgaggtgttcaacatcctgagagagctgtacgaggaactggtgcccagcagcgtggaaaagaagggcgaagccaaccagctgagcaacaagtttctgtaccctctggtggaccccaacagccagtctggaaagggaacagccagcagcggcagaaagcccagatggtacaacctgaagattgccggcgatccctcctgggaagaagagaagaagaagtgggaagaagataagaaaaaggacccgctggccaagatcctgggcaagctggctgagtacggactgatccctctgttcatcccctacaccgacagcaacgagcccatcgtgaaagaaatcaagtggatggaaaagtcccggaaccagagcgtgcggcggctggataaggacatgttcattcaggccctggaacggttcctgagctgggagagctggaacctgaaagtgaaagaggaatacgagaaggtcgagaaagagtacaagaccctggaagagaggatcaaagaggacatccaggctctgaaggctctggaacagtatgagaaagagcggcaagaacagctgctgcgggacaccctgaacaccaacgagtaccggctgagcaagagaggccttagaggctggcgggaaatcatccagaaatggctgaaaatggacggaggctctggaggaagctccgaagtcgagttttcccatgagtactggatgagacacgcattgactctcgcaaagagggctcgagatgaacgcgaggtgcccgtgggggcagtactcgtgctcaacaatcgcgtaatcggcgaaggttggaatagggcaatcggactccacgaccccactgcacatgcggaaatcatggcccttcgacagggagggcttgtgatgcagaattatcgactttatgatgcgacgctgtacgtcacgtttgaaccttgcgtaatgtgcgcgggagctatgattcactcccgcattggacgagttgtattcggtgttcgcaacgccaagacgggtgccgcaggttcactgatggacgtgctgcatcatccaggcatgaaccaccgggtagaaatcacagaaggcatattggcggacgaatgtgcggcgctgttgtgtcgtttttttcgcatgcccaggcgggtctttaacgcccagaaaaaagcacaatcctctactgacggctcttctggatctgaaacacctggcacaagcgagagcgccacccctgagagctctggcgagaacgagccctccgagaagtacctggaagtgttcaaggactaccagcggaagcaccctagagaggccggcgattacagcgtgtacgagttcctgtccaagaaagagaaccacttcatctggcggaatcaccctgagtacccctacctgtacgccaccttctgcgagatcgacaagaaaaagaaggacgccaagcagcaggccaccttcacactggccgatcctatcaatcaccctctgtgggtccgattcgaggaaagaagcggcagcaacctgaacaagtacagaatcctgaccgagcagctgcacaccgagaagctgaagaaaaagctgacagtgcagctggaccggctgatctaccctacagaatctggcggctgggaagagaagggcaaagtggacattgtgctgctgcccagccggcagttctacaaccagatcttcctggacatcgaggaaaagggcaagcacgccttcacctacaaggatgagagcatcaagttccctctgaagggcacactcggcggagccagagtgcagttcgacagagatcacctgagaagataccctcacaaggtggaaagcggcaacgtgggcagaatctacttcaacatgaccgtgaacatcgagcctacagagtccccagtgtccaagtctctgaagatccaccgggacgacttccccaaggtggtcaacttcaagcccaaagaactgaccgagtggatcaaggacagcaagggcaagaaactgaagtccggcatcgagtccctggaaatcggcctgagagtgatgagcatcgacctgggacagagacaggccgctgccgcctctattttcgaggtggtggatcagaagcccgacatcgaaggcaagctgtttttcccaatcaagggcaccgagctgtatgccgtgcacagagccagcttcaacatcaagctgcccggcgagacactggtcaagagcagagaagtgctgcggaaggccagagaggacaatctgaaactgatgaaccagaagctcaacttcctgcggaacgtgctgcacttccagcagttcgaggacatcaccgagagagagaagcgggtcaccaagtggatcagcagacaagagaacagcgacgtgcccctggtgtaccaggatgagctgatccagatccgcgagctgatgtacaagccttacaaggactgggtcgccttcctgaagcagctccacaagagactggaagtcgagatcggcaaagaagtgaagcactggcggaagtccctgagcgacggaagaaagggcctgtacggcatctccctgaagaacatcgacgagatcgatcggacccggaagttcctgctgagatggtccctgaggcctaccgaacctggcgaagtgcgtagactggaacccggccagagattcgccatcgaccagctgaatcacctgaacgccctgaaagaagatcggctgaagaagatggccaacaccatcatcatgcacgccctgggctactgctacgacgtgcggaagaagaaatggcaggctaagaaccccgcctgccagatcatcctgttcgaggatctgagcaactacaacccctacgaggaaaggtcccgcttcgagaacagcaagctcatgaagtggtccagacgcgagatccccagacaggttgcactgcagggcgagatctatggcctgcaagtgggagaagtgggcgctcagttcagcagcagattccacgccaagacaggcagccctggcatcagatgtagcgtcgtgaccaaagagaagctgcaggacaatcggttcttcaagaatctgcagagagagggcagactgaccctggacaaaatcgccgtgctgaaagagggcgatctgtacccagacaaaggcggcgagaagttcatcagcctgagcaaggatcggaagtgcgtgaccacacacgccgacatcaacgccgctcagaacctgcagaagcggttctggacaagaacccacggcttctacaaggtgtactgcaaggcctaccaggtggacggccagaccgtgtacatccctgagagcaaggaccagaagcagaagatcatcgaagagttcggcgagggctacttcattctgaaggacggggtgtacgaatgggtcaacgccggcaagctgaaaatcaagaagggcagctccaagcagagcagcagcgagctggtggatagcgacatcctgaaagacagcttcgacctggcctccgagctgaaaggcgaaaagctgatgctgtacagggaccccagcggcaatgtgttccccagcgacaaatggatggccgctggcgtgttcttcggaaagctggaacgcatcctgatcagcaagctgaccaaccagtactccatcagcaccatcgaggacgacagcagcaagcagtctatgaaaaggccggcggccacgaaaaaggccggccaggcaaaaaagaaaaagggatcctacccatacgatgttccagattacgcttatccctacgacgtgcctgattatgcatacccatatgatgtccccgactatgcctaa

SEQ ID NO: 109 - protein, 1361 aa, Artificial Sequence
  Description of Artificial Sequence: Synthetic polypeptide
MAPKKKRKVGIHGVPAAATRSFILKIEPNEEVKKGLWKTHEVLNHGIAYYMNILKLIRQEAIYEHHEQDPKNPKKVSKAEIQAELWDFVLKMQKCNSFTHEVDKDEVFNILRELYEELVPSSVEKKGEANQLSNKFLYPLVDPNSQSGKGTASSGRKPRWYNLKIAGDPSWEEEKKKWEEDKKKDPLAKILGKLAEYGLIPLFIPYTDSNEPIVKEIKWMEKSRNQSVRRLDKDMFIQALERFLSWESWNLKVKEEYEKVEKEYKTLEERIKEDIQALKALEQYEKERQEQLLRDTLNTNEYRLSKRGLRGWREIIQKWLKMDGGSGGSSEVEFSHEYWMRHALTLAKRARDEREVPVGAVLVLNNRVIGEGWNRAIGLHDPTAHAEIMALRQGGLVMQNYRLYDATLYVTFEPCVMCAGAMIHSRIGRVVFGVRNAKTGAAGSLMDVLHHPGMNHRVEITEGILADECAALLCRFFRMPRRVFNAQKKAQSSTDGSSGSETPGTSESATPESSGENEPSEKYLEVFKDYQRKHPREAGDYSVYEFLSKKENHFIWRNHPEYPYLYATFCEIDKKKKDAKQQATFTLADPINHPLWVRFEERSGSNLNKYRILTEQLHTEKLKKKLTVQLDRLIYPTESGGWEEKGKVDIVLLPSRQFYNQIFLDIEEKGKHAFTYKDESIKFPLKGTLGGARVQFDRDHLRRYPHKVESGNVGRIYFNMTVNIEPTESPVSKSLKIHRDDFPKVVNFKPKELTEWIKDSKGKKLKSGIESLEIGLRVMSIDLGQRQAAAASIFEVVDQKPDIEGKLFFPIKGTELYAVHRASFNIKLPGETLVKSREVLRKAREDNLKLMNQKLNFLRNVLHFQQFEDITEREKRVTKWISRQENSDVPLVYQDELIQIRELMYKPYKDWVAFLKQLHKRLEVEIGKEVKHWRKSLSDGRKGLYGISLKNIDEIDRTRKFLLRWSLRPTEPGEVRRLEPGQRFAIDQLNHLNALKEDRLKKMANTIIMHALGYCYDVRKKKWQAKNPACQIILFEDLSNYNPYEERSRFENSKLMKWSRREIPRQVALQGEIYGLQVGEVGAQFSSRFHAKTGSPGIRCSVVTKEKLQDNRFFKNLQREGRLTLDKIAVLKEGDLYPDKGGEKFISLSKDRKCVTTHADINAAQNLQKRFWTRTHGFYKVYCKAYQVDGQTVYIPESKDQKQKIIEEFGEGYFILKDGVYEWVNAGKLKIKKGSSKQSSSELVDSDILKDSFDLASELKGEKLMLYRDPSGNVFPSDKWMAAGVFFGKLERILISKLTNQYSISTIEDDSSKQSMKRPAATKKAGQAKKKKGSYPYDVPDYAYPYDVPDYAYPYDVPDYA

SEQ ID NO: 110 - DNA, 4092 bp, Artificial Sequence
  Description of Artificial Sequence: Synthetic polynucleotide
gccaccatggccccaaagaagaagcggaaggtcggtatccacggagtcccagcagccgccaccagatccttcatcctgaagatcgagcccaacgaggaagtgaagaaaggcctctggaaaacccacgaggtgctgaaccacggaatcgcctactacatgaatatcctgaagctgatccggcaagaggccatctacgagcaccacgagcaggaccccaagaatcccaagaaggtgtccaaggccgagatccaggccgagctgtgggatttcgtgctgaagatgcagaagtgcaacagcttcacacacgaggtggacaaggacgaggtgttcaacatcctgagagagctgtacgaggaactggtgcccagcagcgtggaaaagaagggcgaagccaaccagctgagcaacaagtttctgtaccctctggtggaccccaacagccagtctggaaagggaacagccagcagcggcagaaagcccagatggtacaacctgaagattgccggcgatccctcctgggaagaagagaagaagaagtgggaagaagataagaaaaaggacccgctggccaagatcctgggcaagctggctgagtacggactgatccctctgttcatcccctacaccgacagcaacgagcccatcgtgaaagaaatcaagtggatggaaaagtcccggaaccagagcgtgcggcggctggataaggacatgttcattcaggccctggaacggttcctgagctgggagagctggaacctgaaagtgaaagaggaatacgagaaggtcgagaaagagtacaagaccctggaagagaggatcaaagaggacatccaggctctgaaggctctggaacagtatgagaaagagcggcaagaacagctgctgcgggacaccctgaacaccaacgagtaccggctgagcaagagaggccttagaggctggcgggaaatcatccagaaatggctgaaaatggacgagaacgagccctccgagaagtacctggaagtgttcaaggactaccagcggaagcaccctagagaggccggcgattacagcgtgtacgagttcctgtccaagaaagagaaccacttcatctggcggaatcaccctgagtacccctacctgtacgccaccttctgcgagatcgacaagaaaaagaaggacgccaagcagcaggccaccttcacactggccgatcctatcaatcaccctctgtgggtccgattcgaggaaagaagcggcagcaacctgaacaagtacagaatcctgaccgagcagctgcacaccgagaagctgaagaaaaagctgacagtgcagctggaccggctgatctaccctacagaatctggcggctgggaagagaagggcaaagtggacattgtgctgctgcccagccggcagttctacaaccagatcttcctggacatcgaggaaaagggcaagcacgccttcacctacaaggatgagagcatcaagttccctctgaagggcacactcggcggagccagagtgcagttcgacagagatcacctgagaagataccctcacaaggtggaaagcggcaacgtgggcagaatctacttcaacatgaccgtgaacatcgagcctacagagtccccagtgtccaagtctctgaagatccaccgggacgacttccccaaggtggtcaacttcaagcccaaagaactgaccgagtggatcaaggacagcaagggcaagaaactgaagtccggcatcgagtccctggaaatcggcctgagagtgatgagcatcgacctgggacagagacaggccgctgccgcctctattttcgaggtggtggatcagaagcccgacatcgaaggcaagctgtttttcccaatcaagggcaccgagctgtatgccgtgcacagagccagcttcaacatcaagctgcccggcgagacactggtcaagagcagagaagtgctgcggaaggccagagaggacaatctgaaactgatgaaccagaagctcaacttcctgcggaacgtgctgcacttccagcagttcgaggacatcaccgagagagagaagcgggtcaccaagtggatcagcagacaagagaacagcgacgtgcccctggtgtaccaggatgagctgatccagatccgcgagctgatgtacaagccttacaaggactgggtcgccttcctgaagcagctccacaagagactggaagtcgagatcggcaaagaagtgaagcactggcggaagtccctgagcgacggaagaaagggcctgtacggcatctccctgaagaacatcgacgagatcgatcggacccggaagttcctgctgagatggtccctgaggcctaccgaacctggcgaagtgcgtagactggaacccggccagagattcgccatcgaccagctgaatcacctgaacgccctgaaagaagatcggctgaagaagatggccaacaccatcatcatgcacgccctgggctactgctacgacgtgcggaagaagaaatggcaggctaagaaccccgcctgccagatcatcctgttcgaggatctgagcaactacaacccctacgaggaaaggtcccgcttcgagaacagcaagctcatgaagtggtccagacgcgagatccccagacaggttgcactgcagggcgagatctatggcctgcaagtgggagaagtgggcgctcagttcagcagcagattccacgccaagacaggcagccctggcatcagatgtagcgtcgtgaccaaagagaagctgcaggacaatcggttcttcaagaatctgcagagagagggcagactgaccctggacaaaatcgccgtgctgaaagagggcgatctgtacccagacaaaggcggcgagaagttcatcagcctgagcaaggatcggaagtgcgtgaccacacacgccgacatcaacgccgctcagaacctgcagaagcggttctggacaagaacccacggcttctacaaggtgtactgcaaggcctaccaggtggacggaggctctggaggaagctccgaagtcgagttttcccatgagtactggatgagacacgcattgactctcgcaaagagggctcgagatgaacgcgaggtgcccgtgggggcagtactcgtgctcaacaatcgcgtaatcggcgaaggttggaatagggcaatcggactccacgaccccactgcacatgcggaaatcatggcccttcgacagggagggcttgtgatgcagaattatcgactttatgatgcgacgctgtacgtcacgtttgaaccttgcgtaatgtgcgcgggagctatgattcactcccgcattggacgagttgtattcggtgttcgcaacgccaagacgggtgccgcaggttcactgatggacgtgctgcatcatccaggcatgaaccaccgggtagaaatcacagaaggcatattggcggacgaatgtgcggcgctgttgtgtcgtttttttcgcatgcccaggcgggtctttaacgcccagaaaaaagcacaatcctctactgacggctcttctggatctgaaacacctggcacaagcgagagcgccacccctgagagctctggcggccagaccgtgtacatccctgagagcaaggaccagaagcagaagatcatcgaagagttcggcgagggctacttcattctgaaggacggggtgtacgaatgggtcaacgccggcaagctgaaaatcaagaagggcagctccaagcagagcagcagcgagctggtggatagcgacatcctgaaagacagcttcgacctggcctccgagctgaaaggcgaaaagctgatgctgtacagggaccccagcggcaatgtgttccccagcgacaaatggatggccgctggcgtgttcttcggaaagctggaacgcatcctgatcagcaagctgaccaaccagtactccatcagcaccatcgaggacgacagcagcaagcagtctatgaaaaggccggcggccacgaaaaaggccggccaggcaaaaaagaaaaagggatcctacccatacgatgttccagattacgcttatccctacgacgtgcctgattatgcatacccatatgatgtccccgactatgcctaa

SEQ ID NO: 111 - protein, 1361 aa, Artificial Sequence
  Description of Artificial Sequence: Synthetic polypeptide
MAPKKKRKVGIHGVPAAATRSFILKIEPNEEVKKGLWKTHEVLNHGIAYYMNILKLIRQEAIYEHHEQDPKNPKKVSKAEIQAELWDFVLKMQKCNSFTHEVDKDEVFNILRELYEELVPSSVEKKGEANQLSNKFLYPLVDPNSQSGKGTASSGRKPRWYNLKIAGDPSWEEEKKKWEEDKKKDPLAKILGKLAEYGLIPLFIPYTDSNEPIVKEIKWMEKSRNQSVRRLDKDMFIQALERFLSWESWNLKVKEEYEKVEKEYKTLEERIKEDIQALKALEQYEKERQEQLLRDTLNTNEYRLSKRGLRGWREIIQKWLKMDENEPSEKYLEVFKDYQRKHPREAGDYSVYEFLSKKENHFIWRNHPEYPYLYATFCEIDKKKKDAKQQATFTLADPINHPLWVRFEERSGSNLNKYRILTEQLHTEKLKKKLTVQLDRLIYPTESGGWEEKGKVDIVLLPSRQFYNQIFLDIEEKGKHAFTYKDESIKFPLKGTLGGARVQFDRDHLRRYPHKVESGNVGRIYFNMTVNIEPTESPVSKSLKIHRDDFPKVVNFKPKELTEWIKDSKGKKLKSGIESLEIGLRVMSIDLGQRQAAAASIFEVVDQKPDIEGKLFFPIKGTELYAVHRASFNIKLPGETLVKSREVLRKAREDNLKLMNQKLNFLRNVLHFQQFEDITEREKRVTKWISRQENSDVPLVYQDELIQIRELMYKPYKDWVAFLKQLHKRLEVEIGKEVKHWRKSLSDGRKGLYGISLKNIDEIDRTRKFLLRWSLRPTEPGEVRRLEPGQRFAIDQLNHLNALKEDRLKKMANTIIMHALGYCYDVRKKKWQAKNPACQIILFEDLSNYNPYEERSRFENSKLMKWSRREIPRQVALQGEIYGLQVGEVGAQFSSRFHAKTGSPGIRCSVVTKEKLQDNRFFKNLQREGRLTLDKIAVLKEGDLYPDKGGEKFISLSKDRKCVTTHADINAAQNLQKRFWTRTHGFYKVYCKAYQVDGGSGGSSEVEFSHEYWMRHALTLAKRARDEREVPVGAVLVLNNRVIGEGWNRAIGLHDPTAHAEIMALRQGGLVMQNYRLYDATLYVTFEPCVMCAGAMIHSRIGRVVFGVRNAKTGAAGSLMDVLHHPGMNHRVEITEGILADECAALLCRFFRMPRRVFNAQKKAQSSTDGSSGSETPGTSESATPESSGGQTVYIPESKDQKQKIIEEFGEGYFILKDGVYEWVNAGKLKIKKGSSKQSSSELVDSDILKDSFDLASELKGEKLMLYRDPSGNVFPSDKWMAAGVFFGKLERILISKLTNQYSISTIEDDSSKQSMKRPAATKKAGQAKKKKGSYPYDVPDYAYPYDVPDYAYPYDVPDYA

SEQ ID NO: 112 - DNA, 4092 bp, Artificial Sequence
  Description of Artificial Sequence: Synthetic polynucleotide
gccaccatggccccaaagaagaagcggaaggtcggtatccacggagtcccagcagccgccaccagatccttcatcctgaagatcgagcccaacgaggaagtgaagaaaggcctctggaaaacccacgaggtgctgaaccacggaatcgcctactacatgaatatcctgaagctgatccggcaagaggccatctacgagcaccacgagcaggaccccaagaatcccaagaaggtgtccaaggccgagatccaggccgagctgtgggatttcgtgctgaagatgcagaagtgcaacagcttcacacacgaggtggacaaggacgaggtgttcaacatcctgagagagctgtacgaggaactggtgcccagcagcgtggaaaagaagggcgaagccaaccagctgagcaacaagtttctgtaccctctggtggaccccaacagccagtctggaaagggaacagccagcagcggcagaaagcccagatggtacaacctgaagattgccggcgatccctcctgggaagaagagaagaagaagtgggaagaagataagaaaaaggacccgctggccaagatcctgggcaagctggctgagtacggactgatccctctgttcatcccctacaccgacagcaacgagcccatcgtgaaagaaatcaagtggatggaaaagtcccggaaccagagcgtgcggcggctggataaggacatgttcattcaggccctggaacggttcctgagctgggagagctggaacctgaaagtgaaagaggaatacgagaaggtcgagaaagagtacaagaccctggaagagaggatcaaagaggacatccaggctctgaaggctctggaacagtatgagaaagagcggcaagaacagctgctgcgggacaccctgaacaccaacgagtaccggctgagcaagagaggccttagaggctggcgggaaatcatccagaaatggctgaaaatggacgagaacgagccctccgagaagtacctggaagtgttcaaggactaccagcggaagcaccctagagaggccggcgattacagcgtgtacgagttcctgtccaagaaagagaaccacttcatctggcggaatcaccctgagtacccctacctgtacgccaccttctgcgagatcgacaagaaaaagaaggacgccaagcagcaggccaccttcacactggccgatcctatcaatcaccctctgtgggtccgattcgaggaaagaagcggcagcaacctgaacaagtacagaatcctgaccgagcagctgcacaccgagaagctgaagaaaaagctgacagtgcagctggaccggctgatctaccctacagaatctggcggctgggaagagaagggcaaagtggacattgtgctgctgcccagccggcagttctacaaccagatcttcctggacatcgaggaaaagggcaagcacgccttcacctacaaggatgagagcatcaagttccctctgaagggcacactcggcggagccagagtgcagttcgacagagatcacctgagaagataccctcacaaggtggaaagcggcaacgtgggcagaatctacttcaacatgaccgtgaacatcgagcctacagagtccccagtgtccaagtctctgaagatccaccgggacgacttccccaaggtggtcaacttcaagcccaaagaactgaccgagtggatcaaggacagcaagggcaagaaactgaagtccggcatcgagtccctggaaatcggcctgagagtgatgagcatcgacctgggacagagacaggccgctgccgcctctattttcgaggtggtggatcagaagcccgacatcgaaggcaagctgtttttcccaatcaagggcaccgagctgtatgccgtgcacagagccagcttcaacatcaagctgcccggcgagacactggtcaagagcagagaagtgctgcggaaggccagagaggacaatctgaaactgatgaaccagaagctcaacttcctgcggaacgtgctgcacttccagcagttcgaggacatcaccgagagagagaagcgggtcaccaagtggatcagcagacaagagaacagcgacgtgcccctggtgtaccaggatgagctgatccagatccgcgagctgatgtacaagccttacaaggactgggtcgccttcctgaagcagctccacaagagactggaagtcgagatcggcaaagaagtgaagcactggcggaagtccctgagcgacggaagaaagggcctgtacggcatctccctgaagaacatcgacgagatcgatcggacccggaagttcctgctgagatggtccctgaggcctaccgaacctggcgaagtgcgtagactggaacccggccagagattcgccatcgaccagctgaatcacctgaacgccctgaaagaagatcggctgaagaagatggccaacaccatcatcatgcacgccctgggctactgctacgacgtgcggaagaagaaatggcaggctaagaaccccgcctgccagatcatcctgttcgaggatctgagcaactacaacccctacgaggaaaggtcccgcttcgagaacagcaagctcatgaagtggtccagacgcgagatccccagacaggttgcactgcagggcgagatctatggcctgcaagtgggagaagtgggcgctcagttcagcagcagattccacgccaagacaggcagccctggcatcagatgtagcgtcgtgaccaaagagaagctgcaggacaatcggttcttcaagaatctgcagagagagggcagactgaccctggacaaaatcgccgtgctgaaagagggcgatctgtacccagacaaaggcggcgagaagttcatcagcctgagcaaggatcggaagtgcgtgaccacacacgccgacatcaacgccgctcagaacctgcagaagcggttctggacaagaacccacggcttctacaaggtgtactgcaaggcctaccaggtggacggccagaccgtgtacatccctgagagcaaggaccagaagcagaagatcatcgaagagttcggcgagggctacttcattctgaaggacggggtgtacgaatgggtcaacgccggcaagggaggctctggaggaagctccgaagtcgagttttcccatgagtactggatgagacacgcattgactctcgcaaagagggctcgagatgaacgcgaggtgcccgtgggggcagtactcgtgctcaacaatcgcgtaatcggcgaaggttggaatagggcaatcggactccacgaccccactgcacatgcggaaatcatggcccttcgacagggagggcttgtgatgcagaattatcgactttatgatgcgacgctgtacgtcacgtttgaaccttgcgtaatgtgcgcgggagctatgattcactcccgcattggacgagttgtattcggtgttcgcaacgccaagacgggtgccgcaggttcactgatggacgtgctgcatcatccaggcatgaaccaccgggtagaaatcacagaaggcatattggcggacgaatgtgcggcgctgttgtgtcgtttttttcgcatgcccaggcgggtctttaacgcccagaaaaaagcacaatcctctactgacggctcttctggatctgaaacacctggcacaagcgagagcgccacccctgagagctctggcctgaaaatcaagaagggcagctccaagcagagcagcagcgagctggtggatagcgacatcctgaaagacagcttcgacctggcctccgagctgaaaggcgaaaagctgatgctgtacagggaccccagcggcaatgtgttccccagcgacaaatggatggccgctggcgtgttcttcggaaagctggaacgcatcctgatcagcaagctgaccaaccagtactccatcagcaccatcgaggacgacagcagcaagcagtctatgaaaaggccggcggccacgaaaaaggccggccaggcaaaaaagaaaaagggatcctacccatacgatgttccagattacgcttatccctacgacgtgcctgattatgcatacccatatgatgtccccgactatgcctaa

SEQ ID NO: 113 - protein, 1361 aa, Artificial Sequence
  Description of Artificial Sequence: Synthetic polypeptide
MAPKKKRKVGIHGVPAAATRSFILKIEPNEEVKKGLWKTHEVLNHGIAYYMNILKLIRQEAIYEHHEQDPKNPKKVSKAEIQAELWDFVLKMQKCNSFTHEVDKDEVFNILRELYEELVPSSVEKKGEANQLSNKFLYPLVDPNSQSGKGTASSGRKPRWYNLKIAGDPSWEEEKKKWEEDKKKDPLAKILGKLAEYGLIPLFIPYTDSNEPIVKEIKWMEKSRNQSVRRLDKDMFIQALERFLSWESWNLKVKEEYEKVEKEYKTLEERIKEDIQALKALEQYEKERQEQLLRDTLNTNEYRLSKRGLRGWREIIQKWLKMDENEPSEKYLEVFKDYQRKHPREAGDYSVYEFLSKKENHFIWRNHPEYPYLYATFCEIDKKKKDAKQQATFTLADPINHPLWVRFEERSGSNLNKYRILTEQLHTEKLKKKLTVQLDRLIYPTESGGWEEKGKVDIVLLPSRQFYNQIFLDIEEKGKHAFTYKDESIKFPLKGTLGGARVQFDRDHLRRYPHKVESGNVGRIYFNMTVNIEPTESPVSKSLKIHRDDFPKVVNFKPKELTEWIKDSKGKKLKSGIESLEIGLRVMSIDLGQRQAAAASIFEVVDQKPDIEGKLFFPIKGTELYAVHRASFNIKLPGETLVKSREVLRKAREDNLKLMNQKLNFLRNVLHFQQFEDITEREKRVTKWISRQENSDVPLVYQDELIQIRELMYKPYKDWVAFLKQLHKRLEVEIGKEVKHWRKSLSDGRKGLYGISLKNIDEIDRTRKFLLRWSLRPTEPGEVRRLEPGQRFAIDQLNHLNALKEDRLKKMANTIIMHALGYCYDVRKKKWQAKNPACQIILFEDLSNYNPYEERSRFENSKLMKWSRREIPRQVALQGEIYGLQVGEVGAQFSSRFHAKTGSPGIRCSVVTKEKLQDNRFFKNLQREGRLTLDKIAVLKEGDLYPDKGGEKFISLSKDRKCVTTHADINAAQNLQKRFWTRTHGFYKVYCKAYQVDGQTVYIPESKDQKQKIIEEFGEGYFILKDGVYEWVNAGKGGSGGSSEVEFSHEYWMRHALTLAKRARDEREVPVGAVLVLNNRVIGEGWNRAIGLHDPTAHAEIMALRQGGLVMQNYRLYDATLYVTFEPCVMCAGAMIHSRIGRVVFGVRNAKTGAAGSLMDVLHHPGMNHRVEITEGILADECAALLCRFFRMPRRVFNAQKKAQSSTDGSSGSETPGTSESATPESSGLKIKKGSSKQSSSELVDSDILKDSFDLASELKGEKLMLYRDPSGNVFPSDKWMAAGVFFGKLERILISKLTNQYSISTIEDDSSKQSMKRPAATKKAGQAKKKKGSYPYDVPDYAYPYDVPDYAYPYDVPDYA

SEQ ID NO: 114 - protein, 7 aa, Artificial Sequence
  Description of Artificial Sequence: Synthetic peptide
GGGSGGS

SEQ ID NO: 115 - protein, 1052 aa, Staphylococcus aureus
KRNYILGLDIGITSVGYGIIDYETRDVIDAGVRLFKEANVENNEGRRSKRGARRLKRRRRHRIQRVKKLLFDYNLLTDHSELSGINPYEARVKGLSQKLSEEEFSAALLHLAKRRGVHNVNEVEEDTGNELSTKEQISRNSKALEEKYVAELQLERLKKDGEVRGSINRFKTSDYVKEAKQLLKVQKAYHQLDQSFIDTYIDLLETRRTYYEGPGEGSPFGWKDIKEWYEMLMGHCTYFPEELRSVKYAYNADLYNALNDLNNLVITRDENEKLEYYEKFQIIENVFKQKKKPTLKQIAKEILVNEEDIKGYRVTSTGKPEFTNLKVYHDIKDITARKEIIENAELLDQIAKILTIYQSSEDIQEELTNLNSELTQEEIEQISNLKGYTGTHNLSLKAINLILDELWHTNDNQIAIFNRLKLVPKKVDLSQQKEIPTTLVDDFILSPVVKRSFIQSIKVINAIIKKYGLPNDIIIELAREKNSKDAQKMINEMQKRNRQTNERIEEIIRTTGKENAKYLIEKIKLHDMQEGKCLYSLEAIPLEDLLNNPFNYEVDHIIPRSVSFDNSFNNKVLVKQEENSKKGNRTPFQYLSSSDSKISYETFKKHILNLAKGKGRISKTKKEYLLEERDINRFSVQKDFINRNLVDTRYATRGLMNLLRSYFRVNNLDVKVKSINGGFTSFLRRKWKFKKERNKGYKHHAEDALIIANADFIFKEWKKLDKAKKVMENQMFEEKQAESMPEIETEQEYKEIFITPHQIKHIKDFKDYKYSHRVDKKPNRELINDTLYSTRKDDKGNTLIVNNLNGLYDKDNDKLKKLINKSPEKLLMYHHDPQTYQKLKLIMEQYGDEKNPLYKYYEETGNYLTKYSKKDNGPVIKKIKYYGNKLNAHLDITDDYPNSRNKVVKLSLKPYRFDVYLDNGVYKFVTVKNLDVIKKENYYEVNSKCYEEAKKLKKISNQAEFIASFYNNDLIKINGELYRVIGVNNDLLNRIEVNMIDITYREYLENMNDKRPPRIIKTIASKTQSIKKYSTDILGNLYEVKSKKHPQIIKKG

SEQ ID NO: 116 - protein, 1052 aa, Staphylococcus aureus
KRNYILGLDIGITSVGYGIIDYETRDVIDAGVRLFKEANVENNEGRRSKRGARRLKRRRRHRIQRVKKLLFDYNLLTDHSELSGINPYEARVKGLSQKLSEEEFSAALLHLAKRRGVHNVNEVEEDTGNELSTKEQISRNSKALEEKYVAELQLERLKKDGEVRGSINRFKTSDYVKEAKQLLKVQKAYHQLDQSFIDTYIDLLETRRTYYEGPGEGSPFGWKDIKEWYEMLMGHCTYFPEELRSVKYAYNADLYNALNDLNNLVITRDENEKLEYYEKFQIIENVFKQKKKPTLKQIAKEILVNEEDIKGYRVTSTGKPEFTNLKVYHDIKDITARKEIIENAELLDQIAKILTIYQSSEDIQEELTNLNSELTQEEIEQISNLKGYTGTHNLSLKAINLILDELWHTNDNQIAIFNRLKLVPKKVDLSQQKEIPTTLVDDFILSPVVKRSFIQSIKVINAIIKKYGLPNDIIIELAREKNSKDAQKMINEMQKRNRQTNERIEEIIRTTGKENAKYLIEKIKLHDMQEGKCLYSLEAIPLEDLLNNPFNYEVDHIIPRSVSFDNSFNNKVLVKQEEASKKGNRTPFQYLSSSDSKISYETFKKHILNLAKGKGRISKTKKEYLLEERDINRFSVQKDFINRNLVDTRYATRGLMNLLRSYFRVNNLDVKVKSINGGFTSFLRRKWKFKKERNKGYKHHAEDALIIANADFIFKEWKKLDKAKKVMENQMFEEKQAESMPEIETEQEYKEIFITPHQIKHIKDFKDYKYSHRVDKKPNRELINDTLYSTRKDDKGNTLIVNNLNGLYDKDNDKLKKLINKSPEKLLMYHHDPQTYQKLKLIMEQYGDEKNPLYKYYEETGNYLTKYSKKDNGPVIKKIKYYGNKLNAHLDITDDYPNSRNKVVKLSLKPYRFDVYLDNGVYKFVTVKNLDVIKKENYYEVNSKCYEEAKKLKKISNQAEFIASFYNNDLIKINGELYRVIGVNNDLLNRIEVNMIDITYREYLENMNDKRPPRIIKTIASKTQSIKKYSTDILGNLYEVKSKKHPQIIKKG

SEQ ID NO: 117 - protein, 1052 aa, Staphylococcus aureus
KRNYILGLDIGITSVGYGIIDYETRDVIDAGVRLFKEANVENNEGRRSKRGARRLKRRRRHRIQRVKKLLFDYNLLTDHSELSGINPYEARVKGLSQKLSEEEFSAALLHLAKRRGVHNVNEVEEDTGNELSTKEQISRNSKALEEKYVAELQLERLKKDGEVRGSINRFKTSDYVKEAKQLLKVQKAYHQLDQSFIDTYIDLLETRRTYYEGPGEGSPFGWKDIKEWYEMLMGHCTYFPEELRSVKYAYNADLYNALNDLNNLVITRDENEKLEYYEKFQIIENVFKQKKKPTLKQIAKEILVNEEDIKGYRVTSTGKPEFTNLKVYHDIKDITARKEIIENAELLDQIAKILTIYQSSEDIQEELTNLNSELTQEEIEQISNLKGYTGTHNLSLKAINLILDELWHTNDNQIAIFNRLKLVPKKVDLSQQKEIPTTLVDDFILSPVVKRSFIQSIKVINAIIKKYGLPNDIIIELAREKNSKDAQKMINEMQKRNRQTNERIEEIIRTTGKENAKYLIEKIKLHDMQEGKCLYSLEAIPLEDLLNNPFNYEVDHIIPRSVSFDNSFNNKVLVKQEEASKKGNRTPFQYLSSSDSKISYETFKKHILNLAKGKGRISKTKKEYLLEERDINRFSVQKDFINRNLVDTRYATRGLMNLLRSYFRVNNLDVKVKSINGGFTSFLRRKWKFKKERNKGYKHHAEDALIIANADFIFKEWKKLDKAKKVMENQMFEEKQAESMPEIETEQEYKEIFITPHQIKHIKDFKDYKYSHRVDKKPNRKLINDTLYSTRKDDKGNTLIVNNLNGLYDKDNDKLKKLINKSPEKLLMYHHDPQTYQKLKLIMEQYGDEKNPLYKYYEETGNYLTKYSKKDNGPVIKKIKYYGNKLNAHLDITDDYPNSRNKVVKLSLKPYRFDVYLDNGVYKFVTVKNLDVIKKENYYEVNSKCYEEAKKLKKISNQAEFIASFYKNDLIKINGELYRVIGVNNDLLNRIEVNMIDITYREYLENMNDKRPPHIIKTIASKTQSIKKYSTDILGNLYEVKSKKHPQIIKKG

SEQ ID NO: 118 - protein, 1368 aa, Artificial Sequence
  Description of Artificial Sequence: Synthetic polypeptide
MDKKYSIGLAIGTNSVGWAVITDEYKVPSKKFKVLGNTDRHSIKKNLIGALLFDSGETAEATRLKRTARRRYTRRKNRICYLQEIFSNEMAKVDDSFFHRLEESFLVEEDKKHERHPIFGNIVDEVAYHEKYPTIYHLRKKLVDSTDKADLRLIYLALAHMIKFRGHFLIEGDLNPDNSDVDKLFIQLVQTYNQLFEENPINASGVDAKAILSARLSKSRRLENLIAQLPGEKKNGLFGNLIALSLGLTPNFKSNFDLAEDAKLQLSKDTYDDDLDNLLAQIGDQYADLFLAAKNLSDAILLSDILRVNTEITKAPLSASMIKRYDEHHQDLTLLKALVRQQLPEKYKEIFFDQSKNGYAGYIDGGASQEEFYKFIKPILEKMDGTEELLVKLNREDLLRKQRTFDNGSIPHQIHLGELHAILRRQEDFYPFLKDNREKIEKILTFRIPYYVGPLARGNSRFAWMTRKSEETITPWNFEEVVDKGASAQSFIERMTAFDKNLPNEKVLPKHSLLYEYFTVYNELTKVKYVTEGMRKPAFLSGEQKKAIVDLLFKTNRKVTVKQLKEDYFKKIECFDSVEISGVEDRFNASLGTYHDLLKIIKDKDFLDNEENEDILEDIVLTLTLFEDREMIEERLKTYAHLFDDKVMKQLKRRRYTGWGALSRKLINGIRDKQSGKTILDFLKSDGFANRNFMALIHDDSLTFKEDIQKAQVSGQGDSLHEHIANLAGSPAIKKGILQTVKVVDELVKVMGRHKPENIVIEMARENQTTQKGQKNSRERMKRIEEGIKELGSQILKEHPVENTQLQNEKLYLYYLQNGRDMYVDQELDINRLSDYDVDHIVPQSFLKDDSIDNKVLTRSDKNRGKSDNVPSEEVVKKMKNYWRQLLNAKLITQRKFDNLTKAERGGLSELDKAGFIKRQLVETRAITKHVAQILDSRMNTKYDENDKLIREVKVITLKSKLVSDFRKDFQFYKVREINNYHHAHDAYLNAVVGTALIKKYPKLESEFVYGDYKVYDVRKMIAKSEQEIGKATAKYFFYSNIMNFFKTEITLANGEIRKRPLIETNGETGEIVWDKGRDFATVRKVLSMPQVNIVKKTEVQTGGFSKESILPKRNSDKLIARKKDWDPKKYGGFDSPTVAYSVLVVAKVEKGKSKKLKSVKELLGITIMERSSFEKNPIDFLEAKGYKEVKKDLIIKLPKYSLFELENGRKRMLASAGELQKGNELALPSKYVNFLYLASHYEKLKGSPEDNEQKQLFVEQHKHYLDEIIEQISEFSKRVILADANLDKVLSAYNKHRDKPIREQAENIIHLFTLTNLGAPAAFKYFDTTIDRKRYTSTKEVLDATLIHQSITGLYETRIDLSQLGGD

SEQ ID NO: 119 - protein, 1368 aa, Streptococcus pyogenes
MDKKYSIGLAIGTNSVGWAVITDEYKVPSKKFKVLGNTDRHSIKKNLIGALLFDSGETAEATRLKRTARRRYTRRKNRICYLQEIFSNEMAKVDDSFFHRLEESFLVEEDKKHERHPIFGNIVDEVAYHEKYPTIYHLRKKLVDSTDKADLRLIYLALAHMIKFRGHFLIEGDLNPDNSDVDKLFIQLVQTYNQLFEENPINASGVDAKAILSARLSKSRRLENLIAQLPGEKKNGLFGNLIALSLGLTPNFKSNFDLAEDAKLQLSKDTYDDDLDNLLAQIGDQYADLFLAAKNLSDAILLSDILRVNTEITKAPLSASMIKRYDEHHQDLTLLKALVRQQLPEKYKEIFFDQSKNGYAGYIDGGASQEEFYKFIKPILEKMDGTEELLVKLNREDLLRKQRTFDNGSIPHQIHLGELHAILRRQEDFYPFLKDNREKIEKILTFRIPYYVGPLARGNSRFAWMTRKSEETITPWNFEEVVDKGASAQSFIERMTNFDKNLPNEKVLPKHSLLYEYFTVYNELTKVKYVTEGMRKPAFLSGEQKKAIVDLLFKTNRKVTVKQLKEDYFKKIECFDSVEISGVEDRFNASLGTYHDLLKIIKDKDFLDNEENEDILEDIVLTLTLFEDREMIEERLKTYAHLFDDKVMKQLKRRRYTGWGRLSRKLINGIRDKQSGKTILDFLKSDGFANRNFMQLIHDDSLTFKEDIQKAQVSGQGDSLHEHIANLAGSPAIKKGILQTVKVVDELVKVMGRHKPENIVIEMARENQTTQKGQKNSRERMKRIEEGIKELGSQILKEHPVENTQLQNEKLYLYYLQNGRDMYVDQELDINRLSDYDVDHIVPQSFLKDDSIDNKVLTRSDKNRGKSDNVPSEEVVKKMKNYWRQLLNAKLITQRKFDNLTKAERGGLSELDKAGFIKRQLVETRQITKHVAQILDSRMNTKYDENDKLIREVKVITLKSKLVSDFRKDFQFYKVREINNYHHAHDAYLNAVVGTALIKKYPKLESEFVYGDYKVYDVRKMIAKSEQEIGKATAKYFFYSNIMNFFKTEITLANGEIRKRPLIETNGETGEIVWDKGRDFATVRKVLSMPQVNIVKKTEVQTGGFSKESILPKRNSDKLIARKKDWDPKKYGGFESPTVAYSVLVVAKVEKGKSKKLKSVKELLGITIMERSSFEKNPIDFLEAKGYKEVKKDLIIKLPKYSLFELENGRKRMLASAGELQKGNELALPSKYVNFLYLASHYEKLKGSPEDNEQKQLFVEQHKHYLDEIIEQISEFSKRVILADANLDKVLSAYNKHRDKPIREQAENIIHLFTLTNLGAPAAFKYFDTTIDRKQYRSTKEVLDATLIHQSITGLYETRIDLSQLGGD

SEQ ID NO: 120 - protein, 1368 aa, Streptococcus pyogenes
MDKKYSIGLAIGTNSVGWAVITDEYKVPSKKFKVLGNTDRHSIKKNLIGALLFDSGETAEATRLKRTARRRYTRRKNRICYLQEIFSNEMAKVDDSFFHRLEESFLVEEDKKHERHPIFGNIVDEVAYHEKYPTIYHLRKKLVDSTDKADLRLIYLALAHMIKFRGHFLIEGDLNPDNSDVDKLFIQLVQTYNQLFEENPINASGVDAKAILSARLSKSRRLENLIAQLPGEKKNGLFGNLIALSLGLTPNFKSNFDLAEDAKLQLSKDTYDDDLDNLLAQIGDQYADLFLAAKNLSDAILLSDILRVNTEITKAPLSASMIKRYDEHHQDLTLLKALVRQQLPEKYKEIFFDQSKNGYAGYIDGGASQEEFYKFIKPILEKMDGTEELLVKLNREDLLRKQRTFDNGSIPHQIHLGELHAILRRQEDFYPFLKDNREKIEKILTFRIPYYVGPLARGNSRFAWMTRKSEETITPWNFEEVVDKGASAQSFIERMTNFDKNLPNEKVLPKHSLLYEYFTVYNELTKVKYVTEGMRKPAFLSGEQKKAIVDLLFKTNRKVTVKQLKEDYFKKIECFDSVEISGVEDRFNASLGTYHDLLKIIKDKDFLDNEENEDILEDIVLTLTLFEDREMIEERLKTYAHLFDDKVMKQLKRRRYTGWGRLSRKLINGIRDKQSGKTILDFLKSDGFANRNFMQLIHDDSLTFKEDIQKAQVSGQGDSLHEHIANLAGSPAIKKGILQTVKVVDELVKVMGRHKPENIVIEMARENQTTQKGQKNSRERMKRIEEGIKELGSQILKEHPVENTQLQNEKLYLYYLQNGRDMYVDQELDINRLSDYDVDHIVPQSFLKDDSIDNKVLTRSDKNRGKSDNVPSEEVVKKMKNYWRQLLNAKLITQRKFDNLTKAERGGLSELDKAGFIKRQLVETRQITKHVAQILDSRMNTKYDENDKLIREVKVITLKSKLVSDFRKDFQFYKVREINNYHHAHDAYLNAVVGTALIKKYPKLESEFVYGDYKVYDVRKMIAKSEQEIGKATAKYFFYSNIMNFFKTEITLANGEIRKRPLIETNGETGEIVWDKGRDFATVRKVLSMPQVNIVKKTEVQTGGFSKESILPKRNSDKLIARKKDWDPKKYGGFVSPTVAYSVLVVAKVEKGKSKKLKSVKELLGITIMERSSFEKNPIDFLEAKGYKEVKKDLIIKLPKYSLFELENGRKRMLASAGELQKGNELALPSKYVNFLYLASHYEKLKGSPEDNEQKQLFVEQHKHYLDEIIEQISEFSKRVILADANLDKVLSAYNKHRDKPIREQAENIIHLFTLTNLGAPAAFKYFDTTIDRKQYRSTKEVLDATLIHQSITGLYETRIDLSQLGGD

SEQ ID NO: 121 - protein, 1368 aa, Streptococcus pyogenes
MDKKYSIGLAIGTNSVGWAVITDEYKVPSKKFKVLGNTDRHSIKKNLIGALLFDSGETAEATRLKRTARRRYTRRKNRICYLQEIFSNEMAKVDDSFFHRLEESFLVEEDKKHERHPIFGNIVDEVAYHEKYPTIYHLRKKLVDSTDKADLRLIYLALAHMIKFRGHFLIEGDLNPDNSDVDKLFIQLVQTYNQLFEENPINASGVDAKAILSARLSKSRRLENLIAQLPGEKKNGLFGNLIALSLGLTPNFKSNFDLAEDAKLQLSKDTYDDDLDNLLAQIGDQYADLFLAAKNLSDAILLSDILRVNTEITKAPLSASMIKRYDEHHQDLTLLKALVRQQLPEKYKEIFFDQSKNGYAGYIDGGASQEEFYKFIKPILEKMDGTEELLVKLNREDLLRKQRTFDNGSIPHQIHLGELHAILRRQEDFYPFLKDNREKIEKILTFRIPYYVGPLARGNSRFAWMTRKSEETITPWNFEEVVDKGASAQSFIERMTNFDKNLPNEKVLPKHSLLYEYFTVYNELTKVKYVTEGMRKPAFLSGEQKKAIVDLLFKTNRKVTVKQLKEDYFKKIECFDSVEISGVEDRFNASLGTYHDLLKIIKDKDFLDNEENEDILEDIVLTLTLFEDREMIEERLKTYAHLFDDKVMKQLKRRRYTGWGRLSRKLINGIRDKQSGKTILDFLKSDGFANRNFMQLIHDDSLTFKEDIQKAQVSGQGDSLHEHIANLAGSPAIKKGILQTVKVVDELVKVMGRHKPENIVIEMARENQTTQKGQKNSRERMKRIEEGIKELGSQILKEHPVENTQLQNEKLYLYYLQNGRDMYVDQELDINRLSDYDVDHIVPQSFLKDDSIDNKVLTRSDKNRGKSDNVPSEEVVKKMKNYWRQLLNAKLITQRKFDNLTKAERGGLSELDKAGFIKRQLVETRQITKHVAQILDSRMNTKYDENDKLIREVKVITLKSKLVSDFRKDFQFYKVREINNYHHAHDAYLNAVVGTALIKKYPKLESEFVYGDYKVYDVRKMIAKSEQEIGKATAKYFFYSNIMNFFKTEITLANGEIRKRPLIETNGETGEIVWDKGRDFATVRKVLSMPQVNIVKKTEVQTGGFSKESILPKRNSDKLIARKKDWDPKKYGGFVSPTVAYSVLVVAKVEKGKSKKLKSVKELLGITIMERSSFEKNPIDFLEAKGYKEVKKDLIIKLPKYSLFELENGRKRMLASARELQKGNELALPSKYVNFLYLASHYEKLKGSPEDNEQKQLFVEQHKHYLDEIIEQISEFSKRVILADANLDKVLSAYNKHRDKPIREQAENIIHLFTLTNLGAPAAFKYFDTTIDRKEYRSTKEVLDATLIHQSITGLYETRIDLSQLGGD

SEQ ID NO: 122 - protein, 1368 aa, Streptococcus pyogenes
MDKKYSIGLAIGTNSVGWAVITDEYKVPSKKFKVLGNTDRHSIKKNLIGALLFDSGETAEATRLKRTARRRYTRRKNRICYLQEIFSNEMAKVDDSFFHRLEESFLVEEDKKHERHPIFGNIVDEVAYHEKYPTIYHLRKKLVDSTDKADLRLIYLALAHMIKFRGHFLIEGDLNPDNSDVDKLFIQLVQTYNQLFEENPINASGVDAKAILSARLSKSRRLENLIAQLPGEKKNGLFGNLIALSLGLTPNFKSNFDLAEDAKLQLSKDTYDDDLDNLLAQIGDQYADLFLAAKNLSDAILLSDILRVNTEITKAPLSASMIKRYDEHHQDLTLLKALVRQQLPEKYKEIFFDQSKNGYAGYIDGGASQEEFYKFIKPILEKMDGTEELLVKLNREDLLRKQRTFDNGSIPHQIHLGELHAILRRQEDFYPFLKDNREKIEKILTFRIPYYVGPLARGNSRFAWMTRKSEETITPWNFEEVVDKGASAQSFIERMTNFDKNLPNEKVLPKHSLLYEYFTVYNELTKVKYVTEGMRKPAFLSGEQKKAIVDLLFKTNRKVTVKQLKEDYFKKIECFDSVEISGVEDRFNASLGTYHDLLKIIKDKDFLDNEENEDILEDIVLTLTLFEDREMIEERLKTYAHLFDDKVMKQLKRRRYTGWGRLSRKLINGIRDKQSGKTILDFLKSDGFANRNFMQLIHDDSLTFKEDIQKAQVSGQGDSLHEHIANLAGSPAIKKGILQTVKVVDELVKVMGRHKPENIVIEMARENQTTQKGQKNSRERMKRIEEGIKELGSQILKEHPVENTQLQNEKLYLYYLQNGRDMYVDQELDINRLSDYDVDHIVPQSFLKDDSIDNKVLTRSDKNRGKSDNVPSEEVVKKMKNYWRQLLNAKLITQRKFDNLTKAERGGLSELDKAGFIKRQLVETRQITKHVAQILDSRMNTKYDENDKLIREVKVITLKSKLVSDFRKDFQFYKVREINNYHHAHDAYLNAVVGTALIKKYPKLESEFVYGDYKVYDVRKMIAKSEQEIGKATAKYFFYSNIMNFFKTEITLANGEIRKRPLIETNGETGEIVWDKGRDFATVRKVLSMPQVNIVKKTEVQTGGFSKESILPKRNSDKLIARKKDWDPKKYGGFVSPTVAYSVLVVAKVEKGKSKKLKSVKELLGITIMERSSFEKNPIDFLEAKGYKEVKKDLIIKLPKYSLFELENGRKRMLASARELQKGNELALPSKYVNFLYLASHYEKLKGSPEDNEQKQLFVEQHKHYLDEIIEQISEFSKRVILADANLDKVLSAYNKHRDKPIREQAENIIHLFTLTNLGAPAAFKYFDTTIDRKQYRSTKEVLDATLIHQSITGLYETRIDLSQLGGD

SEQ ID NO: 123 - protein, 1359 aa, Artificial Sequence
  Description of Artificial Sequence: Synthetic polypeptide
MDKKYSIGLDIGTNSVGWAVITDDYKVPSKKFKVLGNTDRHSIKKNLIGALLFGSGETAEATRLKRTARRRYTRRKNRICYLQEIFSNEMAKVDDSFFHRLEESFLVEEDKKHERHPIFGNIVDEVAYHEKYPTIYHLRKKLADSTDKADLRLIYLALAHMIKFRGHFLIEGDLNPDNSDVDKLFIQLVQIYNQLFEENPINASRVDAKAILSARLSKSRRLENLIAQLPGEKRNGLFGNLIALSLGLTPNFKSNFDLAEDAKLQLSKDTYDDDLDNLLAQIGDQYADLFLAAKNLSDAILLSDILRVNSEITKAPLSASMIKRYDEHHQDLTLLKALVRQQLPEKYKEIFFDQSKNGYAGYIDGGASQEEFYKFIKPILEKMDGTEELLVKLNREDLLRKQRTFDNGSIPHQIHLGELHAILRRQEDFYPFLKDNREKIEKILTFRIPYYVGPLARGNSRFAWMTRKSEETITPWNFEEVVDKGASAQSFIERMTNFDKNLPNEKVLPKHSLLYEYFTVYNELTKVKYVTEGMRKPAFLSGEQKKAIVDLLFKTNRKVTVKQLKEDYFKKIECFDSVEISGVEDRFNASLGAYHDLLKIIKDKDFLDNEENEDILEDIVLTLTLFEDRGMIEERLKTYAHLFDDKVMKQLKRRRYTGWGRLSRKLINGIRDKQSGKTILDFLKSDGFANRNFMQLIHDDSLTFKEDIQKAQVSGQGHSLHEQIANLAGSPAIKKGILQTVKIVDELVKVMGHKPENIVIEMARENQTTQKGQKNSRERMKRIEEGIKELGSQILKEHPVENTQLQNEKLYLYYLQNGRDMYVDQELDINRLSDYDVDHIVPQSFIKDDSIDNKVLTRSDKNRGKSDNVPSEEVVKKMKNYWRQLLNAKLITQRKFDNLTKAERGGLSELDKAGFIKRQLVETRQITKHVAQILDSRMNTKYDENDKLIREVKVITLKSKLVSDFRKDFQFYKVREINNYHHAHDAYLNAVVGTALIKKYPKLESEFVYGDYKVYDVRKMIAKSEQEIGKATAKYFFYSNIMNFFKTEITLANGEIRKRPLIETNGETGEIVWDKGRDFATVRKVLSMPQVNIVKKTEIQTVGQNGGLFDDNPKSPLEVTPSKLVPLKKELNPKKYGGYQKPTTAYPVLLITDTKQLIPISVMNKKQFEQNPVKFLRDRGYQQVGKNDFIKLPKYTLVDIGDGIKRLWASSKEIHKGNQLVVSKKSQILLYHAHHLDSDLSNDYLQNHNQQFDVLFNEIISFSKKCKLGKEHIQKIENVYSNKKNSASIEELAESFIKLLGFTQLGATSPFNFLGVKLNQKQYKGKKDYILPCTEGTLIRQSITGLYETRVDLSKIGED

SEQ ID NO: 124 - protein, 29 aa, Artificial Sequence
  Description of Artificial Sequence: Synthetic peptide
PKKKRKVEGADKRTADGSEFESPKKKRKV

SEQ ID NO: 125 - protein, 23 aa, Artificial Sequence
  Description of Artificial Sequence: Synthetic peptide
RKSGKIAAIVVKRPRKPKKKRKV

SEQ ID NO: 126 - protein, 16 aa, Artificial Sequence
  Description of Artificial Sequence: Synthetic peptide
KRPAATKKAGQAKKKK

SEQ ID NO: 127 - protein, 4 aa, Artificial Sequence
  Description of Artificial Sequence: Synthetic peptide
GGGS

SEQ ID NO: 128 - protein, 5 aa, Artificial Sequence
  Description of Artificial Sequence: Synthetic peptide
GGGGS

SEQ ID NO: 129 - protein, 5 aa, Artificial Sequence
  Description of Artificial Sequence: Synthetic peptide
EAAAK

SEQ ID NO: 130 - protein, 20 aa, Artificial Sequence
  Description of Artificial Sequence: Synthetic peptide
GSSGSETPGTSESATPESSG

SEQ ID NO: 131 - DNA, 18 bp, Artificial Sequence
  Description of Artificial Sequence: Synthetic oligonucleotide
ggaggctctggaggaagc

SEQ ID NO: 132 - DNA, 60 bp, Artificial Sequence
  Description of Artificial Sequence: Synthetic oligonucleotide
ggctcttctggatctgaaacacctggcacaagcgagagcgccacccctgagagctctggc

SEQ ID NO: 133 - protein, 17 aa, Artificial Sequence
  Description of Artificial Sequence: Synthetic peptide
MAPKKKRKVGIHGVPAA

SEQ ID NO: 134 - DNA, 51 bp, Artificial Sequence
  Description of Artificial Sequence: Synthetic oligonucleotide
atggccccaaagaagaagcggaaggtcggtatccacggagtcccagcagcc

SEQ ID NO: 135 - protein, 1554 aa, Artificial Sequence
  Description of Artificial Sequence: Synthetic polypeptide
MDKKYSIGLAIGTNSVGWAVITDEYKVPSKKFKVLGNTDRHSIKKNLIGALLFDSGETAEATRLKRTARRRYTRRKNRICYLQEIFSNEMAKVDDSFFHRLEESFLVEEDKKHERHPIFGNIVDEVAYHEKYPTIYHLRKKLVDSTDKADLRLIYLALAHMIKFRGHFLIEGDLNPDNSDVDKLFIQLVQTYNQLFEENPINASGVDAKAILSARLSKSRRLENLIAQLPGEKKNGLFGNLIALSLGLTPNFKSNFDLAEDAKLQLSKDTYDDDLDNLLAQIGDQYADLFLAAKNLSDAILLSDILRVNTEITKAPLSASMIKRYDEHHQDLTLLKALVRQQLPEKYKEIFFDQSKNGYAGYIDGGASQEEFYKFIKPILEKMDGTEELLVKLNREDLLRKQRTFDNGSIPHQIHLGELHAILRRQEDFYPFLKDNREKIEKILTFRIPYYVGPLARGNSRFAWMTRKSEETITPWNFEEVVDKGASAQSFIERMTNFDKNLPNEKVLPKHSLLYEYFTVYNELTKVKYVTEGMRKPAFLSGEQKKAIVDLLFKTNRKVTVKQLKEDYFKKIECFDSVEISGVEDRFNASLGTYHDLLKIIKDKDFLDNEENEDILEDIVLTLTLFEDREMIEERLKTYAHLFDDKVMKQLKRRRYTGWGRLSRKLINGIRDKQSGKTILDFLKSDGFANRNFMQLIHDDSLTFKEDIQKAQVSGQGDSLHEHIANLAGSPAIKKGILQTVKVVDELVKVMGRHKPENIVIEMARENQTTQKGQKNSRERMKRIEEGIKELGSQILKEHPVENTQLQNEKLYLYYLQNGRDMYVDQELDINRLSDYDVDHIVPQSFLKDDSIDNKVLTRSDKNRGKSDNVPSEEVVKKMKNYWRQLLNAKLITQRKFDNLTKAERGGLSELDKAGFIKRQLVETRQITKHVAQILDSRMNTKYDENDKLIREVKVITLKSKLVSDFRKDFQFYKVREINNYHHAHDAYLNAVVGTALIKKYPKLESEFVYGDYKVGSSGSETPGTSESATPESSGSEVEFSHEYWMRHALTLAKRARDEREVPVGAVLVLNNRVIGEGWNRAIGLHDPTAHAEIMALRQGGLVMQNYRLIDATLYVTFEPCVMCAGAMIHSRIGRVVFGVRNAKTGAAGSLMDVLHYPGMNHRVEITEGILADECAALLCYFFRMPRQVFNAQKKAQSSTDYDVRKMIAKSEQEIGKATAKYFFYSNIMNFFKTEITLANGEIRKRPLIETNGETGEIVWDKGRDFATVRKVLSMPQVNIVKKTEVQTGGFSKESILPKRNSDKLIARKKDWDPKKYGGFDSPTVAYSVLVVAKVEKGKSKKLKSVKELLGITIMERSSFEKNPIDFLEAKGYKEVKKDLIIKLPKYSLFELENGRKRMLASAGELQKGNELALPSKYVNFLYLASHYEKLKGSPEDNEQKQLFVEQHKHYLDEIIEQISEFSKRVILADANLDKVLSAYNKHRDKPIREQAENIIHLFTLTNLGAPAAFKYFDTTIDRKRYTSTKEVLDATLIHQSITGLYETRIDLSQLGGD

SEQ ID NO: 136 - protein, 1554 aa, Artificial Sequence
  Description of Artificial Sequence: Synthetic polypeptide
MDKKYSIGLAIGTNSVGWAVITDEYKVPSKKFKVLGNTDRHSIKKNLIGALLFDSGETAEATRLKRTARRRYTRRKNRICYLQEIFSNEMAKVDDSFFHRLEESFLVEEDKKHERHPIFGNIVDEVAYHEKYPTIYHLRKKLVDSTDKADLRLIYLALAHMIKFRGHFLIEGDLNPDNSDVDKLFIQLVQTYNQLFEENPINASGVDAKAILSARLSKSRRLENLIAQLPGEKKNGLFGNLIALSLGLTPNFKSNFDLAEDAKLQLSKDTYDDDLDNLLAQIGDQYADLFLAAKNLSDAILLSDILRVNTEITKAPLSASMIKRYDEHHQDLTLLKALVRQQLPEKYKEIFFDQSKNGYAGYIDGGASQEEFYKFIKPILEKMDGTEELLVKLNREDLLRKQRTFDNGSIPHQIHLGELHAILRRQEDFYPFLKDNREKIEKILTFRIPYYVGPLARGNSRFAWMTRKSEETITPWNFEEVVDKGASAQSFIERMTNFDKNLPNEKVLPKHSLLYEYFTVYNELTKVKYVTEGMRKPAFLSGEQKKAIVDLLFKTNRKVTVKQLKEDYFKKIECFDSVEISGVEDRFNASLGTYHDLLKIIKDKDFLDNEENEDILEDIVLTLTLFEDREMIEERLKTYAHLFDDKVMKQLKRRRYTGWGRLSRKLINGIRDKQSGKTILDFLKSDGFANRNFMQLIHDDSLTFKEDIQKAQVSGQGDSLHEHIANLAGSPAIKKGILQTVKVVDELVKVMGRHKPENIVIEMARENQTTQKGQKNSRERMKRIEEGIKELGSQILKEHPVENTQLQNEKLYLYYLQNGRDMYVDQELDINRLSDYDVDHIVPQSFLKDDSIDNKVLTRSDKNRGKSDNVPSEEVVKKMKNYWRQLLNAKLITQRKFDNLTKAERGGLSELDKAGFIKRQLVETRQITKHVAQILDSRMNTKYDENDKLIREVKVITLKSKLVSDFRKDFQFYKVREINNYHHAHDAYLNAVVGTALIKKYPKLESEFVYGDYKVYDVRKMIGSSGSETPGTSESATPESSGSEVEFSHEYWMRHALTLAKRARDEREVPVGAVLVLNNRVIGEGWNRAIGLHDPTAHAEIMALRQGGLVMQNYRLIDATLYVTFEPCVMCAGAMIHSRIGRVVFGVRNAKTGAAGSLMDVLHYPGMNHRVEITEGILADECAALLCYFFRMPRQVFNAQKKAQSSTDAKSEQEIGKATAKYFFYSNIMNFFKTEITLANGEIRKRPLIETNGETGEIVWDKGRDFATVRKVLSMPQVNIVKKTEVQTGGFSKESILPKRNSDKLIARKKDWDPKKYGGFDSPTVAYSVLVVAKVEKGKSKKLKSVKELLGITIMERSSFEKNPIDFLEAKGYKEVKKDLIIKLPKYSLFELENGRKRMLASAGELQKGNELALPSKYVNFLYLASHYEKLKGSPEDNEQKQLFVEQHKHYLDEIIEQISEFSKRVILADANLDKVLSAYNKHRDKPIREQAENIIHLFTLTNLGAPAAFKYFDTTIDRKRYTSTKEVLDATLIHQSITGLYETRIDLSQLGGD

SEQ ID NO: 137 - protein, 1554 aa, Artificial Sequence
  Description of Artificial Sequence: Synthetic polypeptide
MDKKYSIGLAIGTNSVGWAVITDEYKVPSKKFKVLGNTDRHSIKKNLIGALLFDSGETAEATRLKRTARRRYTRRKNRICYLQEIFSNEMAKVDDSFFHRLEESFLVEEDKKHERHPIFGNIVDEVAYHEKYPTIYHLRKKLVDSTDKADLRLIYLALAHMIKFRGHFLIEGDLNPDNSDVDKLFIQLVQTYNQLFEENPINASGVDAKAILSARLSKSRRLENLIAQLPGEKKNGLFGNLIALSLGLTPNFKSNFDLAEDAKLQLSKDTYDDDLDNLLAQIGDQYADLFLAAKNLSDAILLSDILRVNTEITKAPLSASMIKRYDEHHQDLTLLKALVRQQLPEKYKEIFFDQSKNGYAGYIDGGASQEEFYKFIKPILEKMDGTEELLVKLNREDLLRKQRTFDNGSIPHQIHLGELHAILRRQEDFYPFLKDNREKIEKILTFRIPYYVGPLARGNSRFAWMTRKSEETITPWNFEEVVDKGASAQSFIERMTNFDKNLPNEKVLPKHSLLYEYFTVYNELTKVKYVTEGMRKPAFLSGEQKKAIVDLLFKTNRKVTVKQLKEDYFKKIECFDSVEISGVEDRFNASLGTYHDLLKIIKDKDFLDNEENEDILEDIVLTLTLFEDREMIEERLKTYAHLFDDKVMKQLKRRRYTGWGRLSRKLINGIRDKQSGKTILDFLKSDGFANRNFMQLIHDDSLTFKEDIQKAQVSGQGDSLHEHIANLAGSPAIKKGILQTVKVVDELVKVMGRHKPENIVIEMARENQTTQKGQKNSRERMKRIEEGIKELGSQILKEHPVENTQLQNEKLYLYYLQNGRDMYVDQELDINRLSDYDVDHIVPQSFLKDDSIDNKVLTRSDKNRGKSDNVPSEEVVKKMKNYWRQLLNAKLITQRKFDNLTKAERGGLSELDKAGFIKRQLVETRQITKHVAQILDSRMNTKYDENDKLIREVKVITLKSKLVSDFRKDFQFYKVREINNYHHAHDAYLNAVVGTALIKKYPKLESEFVYGDYKVYDVRKMIAKSEQEIGSSGSETPGTSESATPESSGSEVEFSHEYWMRHALTLAKRARDEREVPVGAVLVLNNRVIGEGWNRAIGLHDPTAHAEIMALRQGGLVMQNYRLIDATLYVTFEPCVMCAGAMIHSRIGRVVFGVRNAKTGAAGSLMDVLHYPGMNHRVEITEGILADECAALLCYFFRMPRQVFNAQKKAQSSTDGKATAKYFFYSNIMNFFKTEITLANGEIRKRPLIETNGETGEIVWDKGRDFATVRKVLSMPQVNIVKKTEVQTGGFSKESILPKRNSDKLIARKKDWDPKKYGGFDSPTVAYSVLVVAKVEKGKSKKLKSVKELLGITIMERSSFEKNPIDFLEAKGYKEVKKDLIIKLPKYSLFELENGRKRMLASAGELQKGNELALPSKYVNFLYLASHYEKLKGSPEDNEQKQLFVEQHKHYLDEIIEQISEFSKRVILADANLDKVLSAYNKHRDKPIREQAENIIHLFTLTNLGAPAAFKYFDTTIDRKRYTSTKEVLDATLIHQSITGLYETRIDLSQLGGD

SEQ ID NO: 138 - protein, 1554 aa, Artificial Sequence
  Description of Artificial Sequence: Synthetic polypeptide
MDKKYSIGLAIGTNSVGWAVITDEYKVPSKKFKVLGNTDRHSIKKNLIGALLFDSGETAEATRLKRTARRRYTRRKNRICYLQEIFSNEMAKVDDSFFHRLEESFLVEEDKKHERHPIFGNIVDEVAYHEKYPTIYHLRKKLVDSTDKADLRLIYLALAHMIKFRGHFLIEGDLNPDNSDVDKLFIQLVQTYNQLFEENPINASGVDAKAILSARLSKSRRLENLIAQLPGEKKNGLFGNLIALSLGLTPNFKSNFDLAEDAKLQLSKDTYDDDLDNLLAQIGDQYADLFLAAKNLSDAILLSDILRVNTEITKAPLSASMIKRYDEHHQDLTLLKALVRQQLPEKYKEIFFDQSKNGYAGYIDGGASQEEFYKFIKPILEKMDGTEELLVKLNREDLLRKQRTFDNGSIPHQIHLGELHAILRRQEDFYPFLKDNREKIEKILTFRIPYYVGPLARGNSRFAWMTRKSEETITPWNFEEVVDKGASAQSFIERMTNFDKNLPNEKVLPKHSLLYEYFTVYNELTKVKYVTEGMRKPAFLSGEQKKAIVDLLFKTNRKVTVKQLKEDYFKKIECFDSVEISGVEDRFNASLGTYHDLLKIIKDKDFLDNEENEDILEDIVLTLTLFEDREMIEERLKTYAHLFDDKVMKQLKRRRYTGWGRLSRKLINGIRDKQSGKTILDFLKSDGFANRNFMQLIHDDSLTFKEDIQKAQVSGQGDSLHEHIANLAGSPAIKKGILQTVKVVDELVKVMGRHKPENIVIEMARENQTTQKGQKNSRERMKRIEEGIKELGSQILKEHPVENTQLQNEKLYLYYLQNGRDMYVDQELDINRLSDYDVDHIVPQSFLKDDSIDNKVLTRSDKNRGKSDNVPSEEVVKKMKNYWRQLLNAKLITQRKFDNLTKAERGGLSELDKAGFIKRQLVETRQITKHVAQILDSRMNTKYDENDKLIREVKVITLKSKLVSDFRKDFQFYKVREINNYHHAHDAYLNAVVGTALIKKYPKLESEFVYGDYKVYDVRKMIAKSEQEIGKATAKYFFYSGSSGSETPGTSESATPESSGSEVEFSHEYWMRHALTLAKRARDEREVPVGAVLVLNNRVIGEGWNRAIGLHDPTAHAEIMALRQGGLVMQNYRLIDATLYVTFEPCVMCAGAMIHSRIGRVVFGVRNAKTGAAGSLMDVLHYPGMNHRVEITEGILADECAALLCYFFRMPRQVFNAQKKAQSSTDNIMNFFKTEITLANGEIRKRPLIETNGETGEIVWDKGRDFATVRKVLSMPQVNIVKKTEVQTGGFSKESILPKRNSDKLIARKKDWDPKKYGGFDSPTVAYSVLVVAKVEKGKSKKLKSVKELLGITIMERSSFEKNPIDFLEAKGYKEVKKDLIIKLPKYSLFELENGRKRMLASAGELQKGNELALPSKYVNFLYLASHYEKLKGSPEDNEQKQLFVEQHKHYLDEIIEQISEFSKRVILADANLDKVLSAYNKHRDKPIREQAENIIHLFTLTNLGAPAAFKYFDTTIDRKRYTSTKEVLDATLIHQSITGLYETRIDLSQLGGD

SEQ ID NO: 139 - protein, 1554 aa, Artificial Sequence
  Description of Artificial Sequence: Synthetic polypeptide
MDKKYSIGLAIGTNSVGWAVITDEYKVPSKKFKVLGNTDRHSIKKNLIGALLFDSGETAEATRLKRTARRRYTRRKNRICYLQEIFSNEMAKVDDSFFHRLEESFLVEEDKKHERHPIFGNIVDEVAYHEKYPTIYHLRKKLVDSTDKADLRLIYLALAHMIKFRGHFLIEGDLNPDNSDVDKLFIQLVQTYNQLFEENPINASGVDAKAILSARLSKSRRLENLIAQLPGEKKNGLFGNLIALSLGLTPNFKSNFDLAEDAKLQLSKDTYDDDLDNLLAQIGDQYADLFLAAKNLSDAILLSDILRVNTEITKAPLSASMIKRYDEHHQDLTLLKALVRQQLPEKYKEIFFDQSKNGYAGYIDGGASQEEFYKFIKPILEKMDGTEELLVKLNREDLLRKQRTFDNGSIPHQIHLGELHAILRRQEDFYPFLKDNREKIEKILTFRIPYYVGPLARGNSRFAWMTRKSEETITPWNFEEVVDKGASAQSFIERMTNFDKNLPNEKVLPKHSLLYEYFTVYNELTKVKYVTEGMRKPAFLSGEQKKAIVDLLFKTNRKVTVKQLKEDYFKKIECFDSVEISGVEDRFNASLGTYHDLLKIIKDKDFLDNEENEDILEDIVLTLTLFEDREMIEERLKTYAHLFDDKVMKQLKRRRYTGWGRLSRKLINGIRDKQSGKTILDFLKSDGFANRNFMQLIHDDSLTFKEDIQKAQVSGQGDSLHEHIANLAGSPAIKKGILQTVKVVDELVKVMGRHKPENIVIEMARENQTTQKGQKNSRERMKRIEEGIKELGSQILKEHPVENTQLQNEKLYLYYLQNGRDMYVDQELDINRLSDYDVDHIVPQSFLKDDSIDNKVLTRSDKNRGKSDNVPSEEVVKKMKNYWRQLLNAKLITQRKFDNLTKAERGGLSELDKAGFIKRQLVETRQITKHVAQILDSRMNTKYDENDKLIREVKVITLKSKLVSDFRKDFQFYKVREINNYHHAHDAYLNAVVGTALIKKYPKLESEFVYGDYKVYDVRKMIAKSEQEIGKATAKYFFYSNIMNFFKTEITLANGEIRKRPLIETNGEGSSGSETPGTSESATPESSGSEVEFSHEYWMRHALTLAKRARDEREVPVGAVLVLNNRVIGEGWNRAIGLHDPTAHAEIMALRQGGLVMQNYRLIDATLYVTFEPCVMCAGAMIHSRIGRVVFGVRNAKTGAAGSLMDVLHYPGMNHRVEITEGILADECAALLCYFFRMPRQVFNAQKKAQSSTDTGEIVWDKGRDFATVRKVLSMPQVNIVKKTEVQTGGFSKESILPKRNSDKLIARKKDWDPKKYGGFDSPTVAYSVLVVAKVEKGKSKKLKSVKELLGITIMERSSFEKNPIDFLEAKGYKEVKKDLIIKLPKYSLFELENGRKRMLASAGELQKGNELALPSKYVNFLYLASHYEKLKGSPEDNEQKQLFVEQHKHYLDEIIEQISEFSKRVILADANLDKVLSAYNKHRDKPIREQAENIIHLFTLTNLGAPAAFKYFDTTIDRKRYTSTKEVLDATLIHQSITGLYETRIDLSQLGGD

SEQ ID NO: 140 - protein, 1554 aa, Artificial Sequence
  Description of Artificial Sequence: Synthetic polypeptide
MDKKYSIGLAIGTNSVGWAVITDEYKVPSKKFKVLGNTDRHSIKKNLIGALLFDSGETAEATRLKRTARRRYTRRKNRICYLQEIFSNEMAKVDDSFFHRLEESFLVEEDKKHERHPIFGNIVDEVAYHEKYPTIYHLRKKLVDSTDKADLRLIYLALAHMIKFRGHFLIEGDLNPDNSDVDKLFIQLVQTYNQLFEENPINASGVDAKAILSARLSKSRRLENLIAQLPGEKKNGLFGNLIALSLGLTPNFKSNFDLAEDAKLQLSKDTYDDDLDNLLAQIGDQYADLFLAAKNLSDAILLSDILRVNTEITKAPLSASMIKRYDEHHQDLTLLKALVRQQLPEKYKEIFFDQSKNGYAGYIDGGASQEEFYKFIKPILEKMDGTEELLVKLNREDLLRKQRTFDNGSIPHQIHLGELHAILRRQEDFYPFLKDNREKIEKILTFRIPYYVGPLARGNSRFAWMTRKSEETITPWNFEEVVDKGASAQSFIERMTNFDKNLPNEKVLPKHSLLYEYFTVYNELTKVKYVTEGMRKPAFLSGEQKKAIVDLLFKTNRKVTVKQLKEDYFKKIECFDSVEISGVEDRFNASLGTYHDLLKIIKDKDFLDNEENEDILEDIVLTLTLFEDREMIEERLKTYAHLFDDKVMKQLKRRRYTGWGRLSRKLINGIRDKQSGKTILDFLKSDGFANRNFMQLIHDDSLTFKEDIQKAQVSGQGDSLHEHIANLAGSPAIKKGILQTVKVVDELVKVMGRHKPENIVIEMARENQTTQKGQKNSRERMKRIEEGIKELGSQILKEHPVENTQLQNEKLYLYYLQNGRDMYVDQELDINRLSDYDVDHIVPQSFLKDDSIDNKVLTRSDKNRGKSDNVPSEEVVKKMKNYWRQLLNAKLITQRKFDNLTKAERGGLSELDKAGFIKRQLVETRQITKHVAQILDSRMNTKYDENDKLIREVKVITLKSKLVSDFRKDFQFYKVREINNYHHAHDAYLNAVVGTALIKKYPKLESEFVYGDYKVYDVRKMIAKSEQEIGKATAKYFFYSNIMNFFKTEITLANGEIRKRPLIETNGETGEIVWDKGRDFATVRKVLSMPQVNIVKKTEVQTGGFSKESILPKRNSDKLIARKKDWDPKKYGGFDSPTVAYSVLVVAKVEKGKSKKLKSVKELLGITIMERSSFEKNPIDFLEAKGYKEVKKDLIIKLPKYSLFELENGRKRMLASAGELQKGNELALPSKYVNFLYLASHYEKLKGGSSGSETPGTSESATPESSGSEVEFSHEYWMRHALTLAKRARDEREVPVGAVLVLNNRVIGEGWNRAIGLHDPTAHAEIMALRQGGLVMQNYRLIDATLYVTFEPCVMCAGAMIHSRIGRVVFGVRNAKTGAAGSLMDVLHYPGMNHRVEITEGILADECAALLCYFFRMPRQVFNAQKKAQSSTDSPEDNEQKQLFVEQHKHYLDEIIEQISEFSKRVILADANLDKVLSAYNKHRDKPIREQAENIIHLFTLTNLGAPAAFKYFDTTIDRKRYTSTKEVLDATLIHQSITGLYETRIDLSQLGGD

SEQ ID NO: 141 - protein, 1554 aa, Artificial Sequence
  Description of Artificial Sequence: Synthetic polypeptide
MDKKYSIGLAIGTNSVGWAVITDEYKVPSKKFKVLGNTDRHSIKKNLIGALLFDSGETAEATRLKRTARRRYTRRKNRICYLQEIFSNEMAKVDDSFFHRLEESFLVEEDKKHERHPIFGNIVDEVAYHEKYPTIYHLRKKLVDSTDKADLRLIYLALAHMIKFRGHFLIEGDLNPDNSDVDKLFIQLVQTYNQLFEENPINASGVDAKAILSARLSKSRRLENLIAQLPGEKKNGLFGNLIALSLGLTPNFKSNFDLAEDAKLQLSKDTYDDDLDNLLAQIGDQYADLFLAAKNLSDAILLSDILRVNTEITKAPLSASMIKRYDEHHQDLTLLKALVRQQLPEKYKEIFFDQSKNGYAGYIDGGASQEEFYKFIKPILEKMDGTEELLVKLNREDLLRKQRTFDNGSIPHQIHLGELHAILRRQEDFYPFLKDNREKIEKILTFRIPYYVGPLARGNSRFAWMTRKSEETITPWNFEEVVDKGASAQSFIERMTNFDKNLPNEKVLPKHSLLYEYFTVYNELTKVKYVTEGMRKPAFLSGEQKKAIVDLLFKTNRKVTVKQLKEDYFKKIECFDSVEISGVEDRFNASLGTYHDLLKIIKDKDFLDNEENEDILEDIVLTLTLFEDREMIEERLKTYAHLFDDKVMKQLKRRRYTGWGRLSRKLINGIRDKQSGKTILDFLKSDGFANRNFMQLIHDDSLTFKEDIQKAQVSGQGDSLHEHIANLAGSPAIKKGILQTVKVVDELVKVMGRHKPENIVIEMARENQTTQKGQKNSRERMKRIEEGIKELGSQILKEHPVENTQLQNEKLYLYYLQNGRDMYVDQELDINRLSDYDVDHIVPQSFLKDDSIDNKVLTRSDKNRGKSDNVPSEEVVKKMKNYWRQLLNAKLITQRKFDNLTKAERGGLSELDKAGFIKRQLVETRQITKHVAQILDSRMNTKYDENDKLIREVKVITLKSKLVSDFRKDFQFYKVREINNYHHAHDAYLNAVVGTALIKKYPKLESEFVYGDYKVYDVRKMIAKSEQEIGKATAKYFFYSNIMNFFKTEITLANGSSGSETPGTSESATPESSGSEVEFSHEYWMRHALTLAKRARDEREVPVGAVLVLNNRVIGEGWNRAIGLHDPTAHAEIMALRQGGLVMQNYRLIDATLYVTFEPCVMCAGAMIHSRIGRVVFGVRNAKTGAAGSLMDVLHYPGMNHRVEITEGILADECAALLCYFFRMPRQVFNAQKKAQSSTDGEIRKRPLIETNGETGEIVWDKGRDFATVRKVLSMPQVNIVKKTEVQTGGFSKESILPKRNSDKLIARKKDWDPKKYGGFDSPTVAYSVLVVAKVEKGKSKKLKSVKELLGITIMERSSFEKNPIDFLEAKGYKEVKKDLIIKLPKYSLFELENGRKRMLASAGELQKGNELALPSKYVNFLYLASHYEKLKGSPEDNEQKQLFVEQHKHYLDEIIEQISEFSKRVILADANLDKVLSAYNKHRDKPIREQAENIIHLFTLTNLGAPAAFKYFDTTIDRKRYTSTKEVLDATLIHQSITGLYETRIDLSQLGGD

SEQ ID NO: 142 - protein, 1554 aa, Artificial Sequence
  Description of Artificial Sequence: Synthetic polypeptide
MDKKYSIGLAIGTNSVGWAVITDEYKVPSKKFKVLGNTDRHSIKKNLIGALLFDSGETAEATRLKRTARRRYTRRKNRICYLQEIFSNEMAKVDDSFFHRLEESFLVEEDKKHERHPIFGNIVDEVAYHEKYPTIYHLRKKLVDSTDKADLRLIYLALAHMIKFRGHFLIEGDLNPDNSDVDKLFIQLVQTYNQLFEENPINASGVDAKAILSARLSKSRRLENLIAQLPGEKKNGLFGNLIALSLGLTPNFKSNFDLAEDAKLQLSKDTYDDDLDNLLAQIGDQYADLFLAAKNLSDAILLSDILRVNTEITKAPLSASMIKRYDEHHQDLTLLKALVRQQLPEKYKEIFFDQSKNGYAGYIDGGASQEEFYKFIKPILEKMDGTEELLVKLNREDLLRKQRTFDNGSIPHQIHLGELHAILRRQEDFYPFLKDNREKIEKILTFRIPYYVGPLARGNSRFAWMTRKSEETITPWNFEEVVDKGASAQSFIERMTNFDKNLPNEKVLPKHSLLYEYFTVYNELTKVKYVTEGMRKPAFLSGEQKKAIVDLLFKTNRKVTVKQLKEDYFKKIECFDSVEISGVEDRFNASLGTYHDLLKIIKDKDFLDNEENEDILEDIVLTLTLFEDREMIEERLKTYAHLFDDKVMKQLKRRRYTGWGRLSRKLINGIRDKQSGKTILDFLKSDGFANRNFMQLIHDDSLTFKEDIQKAQVSGQGDSLHEHIANLAGSPAIKKGILQTVKVVDELVKVMGRHKPENIVIEMARENQTTQKGQKNSRERMKRIEEGIKELGSQILKEHPVENTQLQNEKLYLYYLQNGRDMYVDQELDINRLSDYDVDHIVPQSFLKDDSIDNKVLTRSDKNRGKSDNVPSEEVVKKMKNYWRQLLNAKLITQRKFDNLTKAERGGLSELDKAGFIKRQLVETRQITKHVAQILDSRMNTKYDENDKLIREVKVITLKSKLVSDFRKDFQFYKVREINNYHHAHDAYLNAVVGTALIKKYPKLESEFVYGDYKVYDVRKMIAKSEGSSGSETPGTSESATPESSGSEVEFSHEYWMRHALTLAKRARDEREVPVGAVLVLNNRVIGEGWNRAIGLHDPTAHAEIMALRQGGLVMQNYRLIDATLYVTFEPCVMCAGAMIHSRIGRVVFGVRNAKTGAAGSLMDVLHYPGMNHRVEITEGILADECAALLCYFFRMPRQVFNAQKKAQSSTDQEIGKATAKYFFYSNIMNFFKTEITLANGEIRKRPLIETNGETGEIVWDKGRDFATVRKVLSMPQVNIVKKTEVQTGGFSKESILPKRNSDKLIARKKDWDPKKYGGFDSPTVAYSVLVVAKVEKGKSKKLKSVKELLGITIMERSSFEKNPIDFLEAKGYKEVKKDLIIKLPKYSLFELENGRKRMLASAGELQKGNELALPSKYVNFLYLASHYEKLKGSPEDNEQKQLFVEQHKHYLDEIIEQISEFSKRVILADANLDKVLSAYNKHRDKPIREQAENIIHLFTLTNLGAPAAFKYFDTTIDRKRYTSTKEVLDATLIHQSITGLYETRIDLSQLGGD

SEQ ID NO: 143 - protein, 1540 aa, Artificial Sequence
  Description of Artificial Sequence: Synthetic polypeptide
MDKKYSIGLAIGTNSVGWAVITDEYKVPSKKFKVLGNTDRHSIKKNLIGALLFDSGETAEATRLKRTARRRYTRRKNRICYLQEIFSNEMAKVDDSFFHRLEESFLVEEDKKHERHPIFGNIVDEVAYHEKYPTIYHLRKKLVDSTDKADLRLIYLALAHMIKFRGHFLIEGDLNPDNSDVDKLFIQLVQTYNQLFEENPINASGVDAKAILSARLSKSRRLENLIAQLPGEKKNGLFGNLIALSLGLTPNFKSNFDLAEDAKLQLSKDTYDDDLDNLLAQIGDQYADLFLAAKNLSDAILLSDILRVNTEITKAPLSASMIKRYDEHHQDLTLLKALVRQQLPEKYKEIFFDQSKNGYAGYIDGGASQEEFYKFIKPILEKMDGTEELLVKLNREDLLRKQRTFDNGSIPHQIHLGELHAILRRQEDFYPFLKDNREKIEKILTFRIPYYVGPLARGNSRFAWMTRKSEETITPWNFEEVVDKGASAQSFIERMTNFDKNLPNEKVLPKHSLLYEYFTVYNELTKVKYVTEGMRKPAFLSGEQKKAIVDLLFKTNRKVTVKQLKEDYFKKIECFDSVEISGVEDRFNASLGTYHDLLKIIKDKDFLDNEENEDILEDIVLTLTLFEDREMIEERLKTYAHLFDDKVMKQLKRRRYTGWGRLSRKLINGIRDKQSGKTILDFLKSDGFANRNFMQLIHDDSLTFKEDIQKAQVSGQGDSLHEHIANLAGSPAIKKGILQTVKVVDELVKVMGRHKPENIVIEMARENQGSSGSETPGTSESATPESSGSEVEFSHEYWMRHALTLAKRARDEREVPVGAVLVLNNRVIGEGWNRAIGLHDPTAHAEIMALRQGGLVMQNYRLIDATLYVTFEPCVMCAGAMIHSRIGRVVFGVRNAKTGAAGSLMDVLHYPGMNHRVEITEGILADECAALLCYFFRMPRTTQKGQKNSRERMKRIEEGIKELGSQILKEHPVENTQLQNEKLYLYYLQNGRDMYVDQELDINRLSDYDVDHIVPQSFLKDDSIDNKVLTRSDKNRGKSDNVPSEEVVKKMKNYWRQLLNAKLITQRKFDNLTKAERGGLSELDKAGFIKRQLVETRQITKHVAQILDSRMNTKYDENDKLIREVKVITLKSKLVSDFRKDFQFYKVREINNYHHAHDAYLNAVVGTALIKKYPKLESEFVYGDYKVYDVRKMIAKSEQEIGKATAKYFFYSNIMNFFKTEITLANGEIRKRPLIETNGETGEIVWDKGRDFATVRKVLSMPQVNIVKKTEVQTGGFSKESILPKRNSDKLIARKKDWDPKKYGGFDSPTVAYSVLVVAKVEKGKSKKLKSVKELLGITIMERSSFEKNPIDFLEAKGYKEVKKDLIIKLPKYSLFELENGRKRMLASAGELQKGNELALPSKYVNFLYLASHYEKLKGSPEDNEQKQLFVEQHKHYLDEIIEQISEFSKRVILADANLDKVLSAYNKHRDKPIREQAENIIHLFTLTNLGAPAAFKYFDTTIDRKRYTSTKEVLDATLIHQSITGLYETRIDLSQLGGD

SEQ ID NO: 144 - protein, 1540 aa, Artificial Sequence
  Description of Artificial Sequence: Synthetic polypeptide
MDKKYSIGLAIGTNSVGWAVITDEYKVPSKKFKVLGNTDRHSIKKNLIGALLFDSGETAEATRLKRTARRRYTRRKNRICYLQEIFSNEMAKVDDSFFHRLEESFLVEEDKKHERHPIFGNIVDEVAYHEKYPTIYHLRKKLVDSTDKADLRLIYLALAHMIKFRGHFLIEGDLNPDNSDVDKLFIQLVQTYNQLFEENPINASGVDAKAILSARLSKSRRLENLIAQLPGEKKNGLFGNLIALSLGLTPNFKSNFDLAEDAKLQLSKDTYDDDLDNLLAQIGDQYADLFLAAKNLSDAILLSDILRVNTEITKAPLSASMIKRYDEHHQDLTLLKALVRQQLPEKYKEIFFDQSKNGYAGYIDGGASQEEFYKFIKPILEKMDGTEELLVKLNREDLLRKQRTFDNGSIPHQIHLGELHAILRRQEDFYPFLKDNREKIEKILTFRIPYYVGPLARGNSRFAWMTRKSEETITPWNFEEVVDKGASAQSFIERMTNFDKNLPNEKVLPKHSLLYEYFTVYNELTKVKYVTEGMRKPAFLSGEQKKAIVDLLFKTNRKVTVKQLKEDYFKKIECFDSVEISGVEDRFNASLGTYHDLLKIIKDKDFLDNEENEDILEDIVLTLTLFEDREMIEERLKTYAHLFDDKVMKQLKRRRYTGWGRLSRKLINGIRDKQSGKTILDFLKSDGFANRNFMQLIHDDSLTFKEDIQKAQVSGQGDSLHEHIANLAGSPAIKKGILQTVKVVDELVKVMGRHKPENIVIEMARENQTTQKGQKNSRERMKRIEEGIKELGSQILKEHPVENTQLQNEKLYLYYLQNGRDMYVDQELDINRLSDYDVDHIVPQSFLKDDSIDNKVLTRSDKNRGKSDNVPSEEVVKKMKNYWRQLLNAKLITQRKFDNLTKAERGGLSELDKAGFIKRQLVETRQITKHVAQILDSRMNTKYDENDKLIREVKVITLKSKLVSDFRKDFQFYKVREINNYHHAHDAYLNAVVGTALIKKYPKLESEFVYGDYKVYDVRKMIAKSEQEIGKATAKYFFYSNIMNFFKTEITLANGEIRKRPLIETNGETGEIVWDKGRDFATVRKVLSMPQVNIVKKTEVQTGGFSKESILPKRNSDKLIARKKDWDPKKYGGFDSPTVAYSVLVVAKVEKGKSKKLKSVKELLGITIMERSSFEKNPIDFLEAKGYKEVKKDLIIKLPKYSLFELENGRKRMLASAGELQKGNELALPSKYVNFLYLASHYEKLKGSPGSSGSETPGTSESATPESSGSEVEFSHEYWMRHALTLAKRARDEREVPVGAVLVLNNRVIGEGWNRAIGLHDPTAHAEIMALRQGGLVMQNYRLIDATLYVTFEPCVMCAGAMIHSRIGRVVFGVRNAKTGAAGSLMDVLHYPGMNHRVEITEGILADECAALLCYFFRMPREDNEQKQLFVEQHKHYLDEIIEQISEFSKRVILADANLDKVLSAYNKHRDKPIREQAENIIHLFTLTNLGAPAAFKYFDTTIDRKRYTSTKEVLDATLIHQSITGLYETRIDLSQLGGD

SEQ ID NO: 145 - protein, 1543 aa, Artificial Sequence
  Description of Artificial Sequence: Synthetic polypeptide
MDKKYSIGLAIGTNSVGWAVITDEYKVPSKKFKVLGNTDRHSIKKNLIGALLFDSGETAEATRLKRTARRRYTRRKNRICYLQEIFSNEMAKVDDSFFHRLEESFLVEEDKKHERHPIFGNIVDEVAYHEKYPTIYHLRKKLVDSTDKADLRLIYLALAHMIKFRGHFLIEGDLNPDNSDVDKLFIQLVQTYNQLFEENPINASGVDAKAILSARLSKSRRLENLIAQLPGEKKNGLFGNLIALSLGLTPNFKSNFDLAEDAKLQLSKDTYDDDLDNLLAQIGDQYADLFLAAKNLSDAILLSDILRVNTEITKAPLSASMIKRYDEHHQDLTLLKALVRQQLPEKYKEIFFDQSKNGYAGYIDGGASQEEFYKFIKPILEKMDGTEELLVKLNREDLLRKQRTFDNGSIPHQIHLGELHAILRRQEDFYPFLKDNREKIEKILTFRIPYYVGPLARGNSRFAWMTRKSEETITPWNFEEVVDKGASAQSFIERMTNFDKNLPNEKVLPKHSLLYEYFTVYNELTKVKYVTEGMRKPAFLSGEQKKAIVDLLFKTNRKVTVKQLKEDYFKKIECFDSVEISGVEDRFNASLGTYHDLLKIIKDKDFLDNEENEDILEDIVLTLTLFEDREMIEERLKTYAHLFDDKVMKQLKRRRYTGWGRLSRKLINGIRDKQSGKTILDFLKSDGFANRNFMQLIHDDSLTFKEDIQKAQVSGQGDSLHEHIANLAGSPAIKKGILQTVKVVDELVKVMGRHKPENIVIEMARENQTTQKGQKNSRERMKRIEEGIKELGSQILKEHPVENTQLQNEKLYLYYLQNGRDMYVDQELDINRLSDYDVDHIVPQSFLKDDSIDNKVLTRSDKNRGKSDNVPSEEVVKKMKNYWRQLLNAKLITQRKFDNLTKAERGGLSELDKAGFIKRQLVETRQITKHVAQILDSRMNTKYDENDKLIREVKVITLKSKLVSDFRKDFQFYKVREINNYHHAHDAYLNAVVGTALIKKYPKLESEFVYGDYKVYDVRKMIAKSEQEIGKATAKYFFYSNIMNFFKTEITLANGEIRKRPLIETNGETGEIVWDKGRDFATVRKVLSMPQVNIVKKTEVQTGGFSKESILPKRNSDKLIARKKDWDPKKYGGFDSPTVAYSVLVVAKVEKGKSKKLKSVKELLGITIMERSSFEKNPIDFLEAKGYKEVKKDLIIKLPKYSLFELENGRKRMLASAGELQKGNELALPSKYVNFLYLASHYEKLKGSPGSSGSSGSETPGTSESATPESSGSEVEFSHEYWMRHALTLAKRARDEREVPVGAVLVLNNRVIGEGWNRAIGLHDPTAHAEIMALRQGGLVMQNYRLIDATLYVTFEPCVMCAGAMIHSRIGRVVFGVRNAKTGAAGSLMDVLHYPGMNHRVEITEGILADECAALLCYFFRMPREDNEQKQLFVEQHKHYLDEIIEQISEFSKRVILADANLDKVLSAYNKHRDKPIREQAENIIHLFTLTNLGAPAAFKYFDTTIDRKRYTSTKEVLDATLIHQSITGLYETRIDLSQLGGD

SEQ ID NO: 146 - protein, 1546 aa, Artificial Sequence
  Description of Artificial Sequence: Synthetic polypeptide
MDKKYSIGLAIGTNSVGWAVITDEYKVPSKKFKVLGNTDRHSIKKNLIGALLFDSGETAEATRLKRTARRRYTRRKNRICYLQEIFSNEMAKVDDSFFHRLEESFLVEEDKKHERHPIFGNIVDEVAYHEKYPTIYHLRKKLVDSTDKADLRLIYLALAHMIKFRGHFLIEGDLNPDNSDVDKLFIQLVQTYNQLFEENPINASGVDAKAILSARLSKSRRLENLIAQLPGEKKNGLFGNLIALSLGLTPNFKSNFDLAEDAKLQLSKDTYDDDLDNLLAQIGDQYADLFLAAKNLSDAILLSDILRVNTEITKAPLSASMIKRYDEHHQDLTLLKALVRQQLPEKYKEIFFDQSKNGYAGYIDGGASQEEFYKFIKPILEKMDGTEELLVKLNREDLLRKQRTFDNGSIPHQIHLGELHAILRRQEDFYPFLKDNREKIEKILTFRIPYYVGPLARGNSRFAWMTRKSEETITPWNFEEVVDKGASAQSFIERMTNFDKNLPNEKVLPKHSLLYEYFTVYNELTKVKYVTEGMRKPAFLSGEQKKAIVDLLFKTNRKVTVKQLKEDYFKKIECFDSVEISGVEDRFNASLGTYHDLLKIIKDKDFLDNEENEDILEDIVLTLTLFEDREMIEERLKTYAHLFDDKVMKQLKRRRYTGWGRLSRKLINGIRDKQSGKTILDFLKSDGFANRNFMQLIHDDSLTFKEDIQKAQVSGQGDSLHEHIANLAGSPAIKKGILQTVKVVDELVKVMGRHKPENIVIEMARENQTTQKGQKNSRERMKRIEEGIKELGSQILKEHPVENTQLQNEKLYLYYLQNGRDMYVDQELDINRLSDYDVDHIVPQSFLKDDSIDNKVLTRSDKNRGKSDNVPSEEVVKKMKNYWRQLLNAKLITQRKFDNLTKAERGGLSELDKAGFIKRQLVETRQITKHVAQILDSRMNTKYDENDKLIREVKVITLKSKLVSDFRKDFQFYKVREINNYHHAHDAYLNAVVGTALIKKYPKLESEFVYGDYKVYDVRKMIAKSEQEIGKATAKYFFYSNIMNFFKTEITLANGEIRKRPLIETNGETGEIVWDKGRDFATVRKVLSMPQVNIVKKTEVQTGGFSKESILPKRNSDKLIARKKDWDPKKYGGFDSPTVAYSVLVVAKVEKGKSKKLKSVKELLGITIMERSSFEKNPIDFLEAKGYKEVKKDLIIKLPKYSLFELENGRKRMLASAGELQKGNELALPSKYVNFLYLASHYEKLKGSPGSSGSSGSETPGTSESATPESGSSSGSEVEFSHEYWMRHALTLAKRARDEREVPVGAVLVLNNRVIGEGWNRAIGLHDPTAHAEIMALRQGGLVMQNYRLIDATLYVTFEPCVMCAGAMIHSRIGRVVFGVRNAKTGAAGSLMDVLHYPGMNHRVEITEGILADECAALLCYFFRMPREDNEQKQLFVEQHKHYLDEIIEQISEFSKRVILADANLDKVLSAYNKHRDKPIREQAENIIHLFTLTNLGAPAAFKYFDTTIDRKRYTSTKEVLDATLIHQSITGLYETRIDLSQLGGD

SEQ ID NO: 147 - protein, 1546 aa, Artificial Sequence
  Description of Artificial Sequence: Synthetic polypeptide
MDKKYSIGLAIGTNSVGWAVITDEYKVPSKKFKVLGNTDRHSIKKNLIGALLFDSGETAEATRLKRTARRRYTRRKNRICYLQEIFSNEMAKVDDSFFHRLEESFLVEEDKKHERHPIFGNIVDEVAYHEKYPTIYHLRKKLVDSTDKADLRLIYLALAHMIKFRGHFLIEGDLNPDNSDVDKLFIQLVQTYNQLFEENPINASGVDAKAILSARLSKSRRLENLIAQLPGEKKNGLFGNLIALSLGLTPNFKSNFDLAEDAKLQLSKDTYDDDLDNLLAQIGDQYADLFLAAKNLSDAILLSDILRVNTEITKAPLSASMIKRYDEHHQDLTLLKALVRQQLPEKYKEIFFDQSKNGYAGYIDGGASQEEFYKFIKPILEKMDGTEELLVKLNREDLLRKQRTFDNGSIPHQIHLGELHAILRRQEDFYPFLKDNREKIEKILTFRIPYYVGPLARGNSRFAWMTRKSEETITPWNFEEVVDKGASAQSFIERMTNFDKNLPNEKVLPKHSLLYEYFTVYNELTKVKYVTEGMRKPAFLSGEQKKAIVDLLFKTNRKVTVKQLKEDYFKKIECFDSVEISGVEDRFNASLGTYHDLLKIIKDKDFLDNEENEDILEDIVLTLTLFEDREMIEERLKTYAHLFDDKVMKQLKRRRYTGWGRLSRKLINGIRDKQSGKTILDFLKSDGFANRNFMQLIHDDSLTFKEDIQKAQVSGQGDSLHEHIANLAGSPAIKKGILQTVKVVDELVKVMGRHKPENIVIEMARENQTTQKGQKNSRERMKRIEEGIKELGSQILKEHPVENTQLQNEKLYLYYLQNGRDMYVDQELDINRLSDYDVDHIVPQSFLKDDSIDNKVLTRSDKNRGKSDNVPSEEVVKKMKNYWRQLLNAKLITQRKFDNLTKAERGGLSELDKAGFIKRQLVETRQITKHVAQILDSRMNTKYDENDKLIREVKVITLKSKLVSDFRKDFQFYKVREINNYHHAHDAYLNAVVGTALIKKYPKLESEFVYGDYKVYDVRKMIAKSEQEIGKATAKYFFYSNIMNFFKTEITLANGEIRKRPLIETNGETGEIVWDKGRDFATVRKVLSMPQVNIVKKTEVQTGGFSKESILPKRNSDKLIARKKDWDPKKYGGFDSPTVAYSVLVVAKVEKGKSKKLKSVKELLGITIMERSSFEKNPIDFLEAKGYKEVKKDLIIKLPKYSLFELENGRKRMLASAGELQKGNELALPSKYVNFLYLASHYEKLKGSPGSSGSSGSETPGTSESATPESGSSSGSEVEFSHEYWMRHALTLAKRARDEREVPVGAVLVLNNRVIGEGWNRAIGLHDPTAHAEIMALRQGGLVMQNYRLIDATLYVTFEPCVMCAGAMIHSRIGRVVFGVRNAKTGAAGSLMDVLHYPGMNHRVEITEGILADECAALLCYFFRMRREDNEQKQLFVEQHKHYLDEIIEQISEFSKRVILADANLDKVLSAYNKHRDKPIREQAENIIHLFTLTNLGAPAAFKYFDTTIDRKRYTSTKEVLDATLIHQSITGLYETRIDLSQLGGD

SEQ ID NO: 148 - protein, 1546 aa, Artificial Sequence
  Description of Artificial Sequence: Synthetic polypeptide
MDKKYSIGLAIGTNSVGWAVITDEYKVPSKKFKVLGNTDRHSIKKNLIGALLFDSGETAEATRLKRTARRRYTRRKNRICYLQEIFSNEMAKVDDSFFHRLEESFLVEEDKKHERHPIFGNIVDEVAYHEKYPTIYHLRKKLVDSTDKADLRLIYLALAHMIKFRGHFLIEGDLNPDNSDVDKLFIQLVQTYNQLFEENPINASGVDAKAILSARLSKSRRLENLIAQLPGEKKNGLFGNLIALSLGLTPNFKSNFDLAEDAKLQLSKDTYDDDLDNLLAQIGDQYADLFLAAKNLSDAILLSDILRVNTEITKAPLSASMIKRYDEHHQDLTLLKALVRQQLPEKYKEIFFDQSKNGYAGYIDGGASQEEFYKFIKPILEKMDGTEELLVKLNREDLLRKQRTFDNGSIPHQIHLGELHAILRRQEDFYPFLKDNREKIEKILTFRIPYYVGPLARGNSRFAWMTRKSEETITPWNFEEVVDKGASAQSFIERMTNFDKNLPNEKVLPKHSLLYEYFTVYNELTKVKYVTEGMRKPAFLSGEQKKAIVDLLFKTNRKVTVKQLKEDYFKKIECFDSVEISGVEDRFNASLGTYHDLLKIIKDKDFLDNEENEDILEDIVLTLTLFEDREMIEERLKTYAHLFDDKVMKQLKRRRYTGWGRLSRKLINGIRDKQSGKTILDFLKSDGFANRNFMQLIHDDSLTFKEDIQKAQVSGQGDSLHEHIANLAGSPAIKKGILQTVKVVDELVKVMGRHKPENIVIEMARENQTTQKGQKNSRERMKRIEEGIKELGSQILKEHPVENTQLQNEKLYLYYLQNGRDMYVDQELDINRLSDYDVDHIVPQSFLKDDSIDNKVLTRSDKNRGKSDNVPSEEVVKKMKNYWRQLLNAKLITQRKFDNLTKAERGGLSELDKAGFIKRQLVETRQITKHVAQILDSRMNTKYDENDKLIREVKVITLKSKLVSDFRKDFQFYKVREINNYHHAHDAYLNAVVGTALIKKYPKLESEFVYGDYKVYDVRKMIAKSEQEIGKATAKYFFYSNIMNFFKTEITLANGEIRKRPLIETNGETGEIVWDKGRDFATVRKVLSMPQVNIVKKTEVQTGGFSKESILPKRNSDKLIARKKDWDPKKYGGFDSPTVAYSVLVVAKVEKGKSKKLKSVKELLGITIMERSSFEKNPIDFLEAKGYKEVKKDLIIKLPKYSLFELENGRKRMLASAGELQKGNELALPSKYVNFLYLASHYEKLKGSGSSGSSGSETPGTSESATPESGSSSGSEVEFSHEYWMRHALTLAKRARDEREVPVGAVLVLNNRVIGEGWNRAIGLHDPTAHAEIMALRQGGLVMQNYRLIDATLYVTFEPCVMCAGAMIHSRIGRVVFGVRNAKTGAAGSLMDVLHYPGMNHRVEITEGILADECAALLCYFFRMRRPEDNEQKQLFVEQHKHYLDEIIEQISEFSKRVILADANLDKVLSAYNKHRDKPIREQAENIIHLFTLTNLGAPAAFKYFDTTIDRKRYTSTKEVLDATLIHQSITGLYETRIDLSQLGGD

SEQ ID NO: 149 - protein, 1551 aa, Artificial Sequence
  Description of Artificial Sequence: Synthetic polypeptide
MDKKYSIGLAIGTNSVGWAVITDEYKVPSKKFKVLGNTDRHSIKKNLIGALLFDSGETAEATRLKRTARRRYTRRKNRICYLQEIFSNEMAKVDDSFFHRLEESFLVEEDKKHERHPIFGNIVDEVAYHEKYPTIYHLRKKLVDSTDKADLRLIYLALAHMIKFRGHFLIEGDLNPDNSDVDKLFIQLVQTYNQLFEENPINASGVDAKAILSARLSKSRRLENLIAQLPGEKKNGLFGNLIALSLGLTPNFKSNFDLAEDAKLQLSKDTYDDDLDNLLAQIGDQYADLFLAAKNLSDAILLSDILRVNTEITKAPLSASMIKRYDEHHQDLTLLKALVRQQLPEKYKEIFFDQSKNGYAGYIDGGASQEEFYKFIKPILEKMDGTEELLVKLNREDLLRKQRTFDNGSIPHQIHLGELHAILRRQEDFYPFLKDNREKIEKILTFRIPYYVGPLARGNSRFAWMTRKSEETITPWNFEEVVDKGASAQSFIERMTNFDKNLPNEKVLPKHSLLYEYFTVYNELTKVKYVTEGMRKPAFLSGEQKKAIVDLLFKTNRKVTVKQLKEDYFKKIECFDSVEISGVEDRFNASLGTYHDLLKIIKDKDFLDNEENEDILEDIVLTLTLFEDREMIEERLKTYAHLFDDKVMKQLKRRRYTGWGRLSRKLINGIRDKQSGKTILDFLKSDGFANRNFMQLIHDDSLTFKEDIQKAQVSGQGDSLHEHIANLAGSPAIKKGILQTVKVVDELVKVMGRHKPENIVIEMARENQTTQKGQKNSRERMKRIEEGIKELGSQILKEHPVENTQLQNEKLYLYYLQNGRDMYVDQELDINRLSDYDVDHIVPQSFLKDDSIDNKVLTRSDKNRGKSDNVPSEEVVKKMKNYWRQLLNAKLITQRKFDNLTKAERGGLSELDKAGFIKRQLVETRQITKHVAQILDSRMNTKYDENDKLIREVKVITLKSKLVSDFRKDFQFYKVREINNYHHAHDAYLNAVVGTALIKKYPKLESEFVYGDYKVYDVRKMIAKSEQEIGKATAKYFFYSNIMNFFKTEITLANGEIRKRPLIETNGETGEIVWDKGRDFATVRKVLSMPQVNIVKKTEVQTGGFSKESILPKRNSDKLIARKKDWDPKKYGGFDSPTVAYSVLVVAKVEKGKSKKLKSVKELLGITIMERSSFEKNPIDFLEAKGYKEVKKDLIIKLPKYSLFELENGRKRMLASAGELQKGNELALPSKYVNFLYLASHYEKLKGSPGSSGSSGSETPGTSESATPESGSSGSEVEFSHEYWMRHALTLAKRARDEREVPVGAVLVLNNRVIGEGWNRAHAEIMALRQGGLVMQNYRLIDATLYVTFEPCVMCAGAMIHSRIGRVVFGVRNAKTGAAGSLMDVLHYPGMNHRVEITEGILADECAALLCYFFRMPRQVFNAQKKAQSSTDEDNEQKQLFVEQHKHYLDEIIEQISEFSKRVILADANLDKVLSAYNKHRDKPIREQAENIIHLFTLTNLGAPAAFKYFDTTIDRKRYTSTKEVLDATLIHQSITGLYETRIDLSQLGGD

SEQ ID NO: 150 - protein, 1546 aa, Artificial Sequence
  Description of Artificial Sequence: Synthetic polypeptide
MDKKYSIGLAIGTNSVGWAVITDEYKVPSKKFKVLGNTDRHSIKKNLIGALLFDSGETAEATRLKRTARRRYTRRKNRICYLQEIFSNEMAKVDDSFFHRLEESFLVEEDKKHERHPIFGNIVDEVAYHEKYPTIYHLRKKLVDSTDKADLRLIYLALAHMIKFRGHFLIEGDLNPDNSDVDKLFIQLVQTYNQLFEENPINASGVDAKAILSARLSKSRRLENLIAQLPGEKKNGLFGNLIALSLGLTPNFKSNFDLAEDAKLQLSKDTYDDDLDNLLAQIGDQYADLFLAAKNLSDAILLSDILRVNTEITKAPLSASMIKRYDEHHQDLTLLKALVRQQLPEKYKEIFFDQSKNGYAGYIDGGASQEEFYKFIKPILEKMDGTEELLVKLNREDLLRKQRTFDNGSIPHQIHLGELHAILRRQEDFYPFLKDNREKIEKILTFRIPYYVGPLARGNSRFAWMTRKSEETITPWNFEEVVDKGASAQSFIERMTNFDKNLPNEKVLPKHSLLYEYFTVYNELTKVKYVTEGMRKPAFLSGEQKKAIVDLLFKTNRKVTVKQLKEDYFKKIECFDSVEISGVEDRFNASLGTYHDLLKIIKDKDFLDNEENEDILEDIVLTLTLFEDREMIEERLKTYAHLFDDKVMKQLKRRRYTGWGRLSRKLINGIRDKQSGKTILDFLKSDGFANRNFMQLIHDDSLTFKEDIQKAQVSGQGDSLHEHIANLAGSPAIKKGILQTVKVVDELVKVMGRHKPENIVIEMARENQTTQKGQKNSRERMKRIEEGIKELGSQILKEHPVENTQLQNEKLYLYYLQNGRDMYVDQELDINRLSDYDVDHIVPQSFLKDDSIDNKVLTRSDKNRGKSDNVPSEEVVKKMKNYWRQLLNAKLITQRKFDNLTKAERGGLSELDKAGFIKRQLVETRQITKHVAQILDSRMNTKYDENDKLIREVKVITLKSKLVSDFRKDFQFYKVREINNYHHAHDAYLNAVVGTALIKKYPKLESEFVYGDYKVYDVRKMIAKSEQEIGKATAKYFFYSNIMNFFKTEITLANGEIRKRPLIETNGETGEIVWDKGRDFATVRKVLSMPQVNIVKKTEVQTGGFSKESILPKRNSDKLIARKKDWDPKKYGGFDSPTVAYSVLVVAKVEKGKSKKLKSVKELLGITIMERSSFEKNPIDFLEAKGYKEVKKDLIIKLPKYSLFELENGRKRMLASAGELQKGNELALPSKYVNFLYLASHYEKLKGSPEGSSGSSGSETPGTSESATPESGSSSGSEVEFSHEYWMRHALTLAKRARDEREVPVGAVLVLNNRVIGEGWNRAIGLHDPTAHAEIMALRQGGLVMQNYRLIDATLYVTFEPCVMCAGAMIHSRIGRVVFGVRNAKTGAAGSLMDVLHYPGMNHRVEITEGILADECAALLCYFFRMRRDNEQKQLFVEQHKHYLDEIIEQISEFSKRVILADANLDKVLSAYNKHRDKPIREQAENIIHLFTLTNLGAPAAFKYFDTTIDRKRYTSTKEVLDATLIHQSITGLYETRIDLSQLGGD

SEQ ID NO: 151 - protein, 1546 aa, Artificial Sequence
  Description of Artificial Sequence: Synthetic polypeptide
MDKKYSIGLAIGTNSVGWAVITDEYKVPSKKFKVLGNTDRHSIKKNLIGALLFDSGETAEATRLKRTARRRYTRRKNRICYLQEIFSNEMAKVDDSFFHRLEESFLVEEDKKHERHPIFGNIVDEVAYHEKYPTIYHLRKKLVDSTDKADLRLIYLALAHMIKFRGHFLIEGDLNPDNSDVDKLFIQLVQTYNQLFEENPINASGVDAKAILSARLSKSRRLENLIAQLPGEKKNGLFGNLIALSLGLTPNFKSNFDLAEDAKLQLSKDTYDDDLDNLLAQIGDQYADLFLAAKNLSDAILLSDILRVNTEITKAPLSASMIKRYDEHHQDLTLLKALVRQQLPEKYKEIFFDQSKNGYAGYIDGGASQEEFYKFIKPILEKMDGTEELLVKLNREDLLRKQRTFDNGSIPHQIHLGELHAILRRQEDFYPFLKDNREKIEKILTFRIPYYVGPLARGNSRFAWMTRKSEETITPWNFEEVVDKGASAQSFIERMTNFDKNLPNEKVLPKHSLLYEYFTVYNELTKVKYVTEGMRKPAFLSGEQKKAIVDLLFKTNRKVTVKQLKEDYFKKIECFDSVEISGVEDRFNASLGTYHDLLKIIKDKDFLDNEENEDILEDIVLTLTLFEDREMIEERLKTYAHLFDDKVMKQLKRRRYTGWGRLSRKLINGIRDKQSGKTILDFLKSDGFANRNFMQLIHDDSLTFKEDIQKAQVSGQGDSLHEHIANLAGSPAIKKGILQTVKVVDELVKVMGRHKPENIVIEMARENQTTQKGQKNSRERMKRIEEGIKELGSQILKEHPVENTQLQNEKLYLYYLQNGRDMYVDQELDINRLSDYDVDHIVPQSFLKDDSIDNKVLTRSDKNRGKSDNVPSEEVVKKMKNYWRQLLNAKLITQRKFDNLTKAERGGLSELDKAGFIKRQLVETRQITKHVAQILDSRMNTKYDENDKLIREVKVITLKSKLVSDFRKDFQFYKVREINNYHHAHDAYLNAVVGTALIKKYPKLESEFVYGDYKVYDVRKMIAKSEQEIGKATAKYFFYSNIMNFFKTEITLANGEIRKRPLIETNGETGEIVWDKGRDFATVRKVLSMPQVNIVKKTEVQTGGFSKESILPKRNSDKLIARKKDWDPKKYGGFDSPTVAYSVLVVAKVEKGKSKKLKSVKELLGITIMERSSFEKNPIDFLEAKGYKEVKKDLIIKLPKYSLFELENGRKRMLASAGELQKGNELALPSKYVNFLYLASHYEKLKGSPEDGSSGSSGSETPGTSESATPESGSSSGSEVEFSHEYWMRHALTLAKRARDEREVPVGAVLVLNNRVIGEGWNRAIGLHDPTAHAEIMALRQGGLVMQNYRLIDATLYVTFEPCVMCAGAMIHSRIGRVVFGVRNAKTGAAGSLMDVLHYPGMNHRVEITEGILADECAALLCYFFRMRRNEQKQLFVEQHKHYLDEIIEQISEFSKRVILADANLDKVLSAYNKHRDKPIREQAENIIHLFTLTNLGAPAAFKYFDTTIDRKRYTSTKEVLDATLIHQSITGLYETRIDLSQLGGD

SEQ ID NO: 152 - protein, 1533 aa, Artificial Sequence
  Description of Artificial Sequence: Synthetic polypeptide
MDKKYSIGLAIGTNSVGWAVITDEYKVPSKKFKVLGNTDRHSIKKNLIGALLFDSGETAEATRLKRTARRRYTRRKNRICYLQEIFSNEMAKVDDSFFHRLEESFLVEEDKKHERHPIFGNIVDEVAYHEKYPTIYHLRKKLVDSTDKADLRLIYLALAHMIKFRGHFLIEGDLNPDNSDVDKLFIQLVQTYNQLFEENPINASGVDAKAILSARLSKSRRLENLIAQLPGEKKNGLFGNLIALSLGLTPNFKSNFDLAEDAKLQLSKDTYDDDLDNLLAQIGDQYADLFLAAKNLSDAILLSDILRVNTEITKAPLSASMIKRYDEHHQDLTLLKALVRQQLPEKYKEIFFDQSKNGYAGYIDGGASQEEFYKFIKPILEKMDGTEELLVKLNREDLLRKQRTFDNGSIPHQIHLGELHAILRRQEDFYPFLKDNREKIEKILTFRIPYYVGPLARGNSRFAWMTRKSEETITPWNFEEVVDKGASAQSFIERMTNFDKNLPNEKVLPKHSLLYEYFTVYNELTKVKYVTEGMRKPAFLSGEQKKAIVDLLFKTNRKVTVKQLKEDYFKKIECFDSVEISGVEDRFNASLGTYHDLLKIIKDKDFLDNEENEDILEDIVLTLTLFEDREMIEERLKTYAHLFDDKVMKQLKRRRYTGWGRLSRKLINGIRDKQSGKTILDFLKSDGFANRNFMQLIHDDSLTFKEDIQKAQVSGQGDSLHEHIANLAGSPAIKKGILQTVKVVDELVKVMGRHKPENIVIEMARENQTTQKGQKNSRERMKRIEEGIKELGSQILKEHPVENTQLQNEKLYLYYLQNGRDMYVDQELDINRLSDYDVDHIVPQSFLKDDSIDNKVLTRSDKNRGKSDNVPSEEVVKKMKNYWRQLLNAKLITQRKFDNLTKAERGGLSELDKAGFIKRQLVETRQITKHVAQILDSRMNTKYDENDKLIREVKVITLKSKLVSDFRKDFQFYKVREINNYHHAHDAYLNAVVGTALIKKYPKLESEFVYGDYKVYDVRKMIAKSEQEIGKATAKYFFYSNIMNFFKTEITLANGEIRKRPLIETNGETGEIVWDKGRDFATVRKVLSMPQVNIVKKTEVQTGGFSKESILPKRNSDKLIARKKDWDPKKYGGFDSPTVAYSVLVVAKVEKGKSKKLKSVKELLGITIMERSSFEKNPIDFLEAKGYKEVKKDLIIKLPKYSLFELENGRKRMLASAGELQKGNELALPSKYVNFLYLASHYEKLKGSPGSSGSETPGTSESATPESSGSEVEFSHEYWMRHALTLAKRARDEREVPVGAVLVLNNRVIGEGWNRAHAEIMALRQGGLVMQNYRLIDATLYVTFEPCVMCAGAMIHSRIGRVVFGVRNAKTGAAGSLMDVLHYPGMNHRVEITEGILADECAALLCYFFRMPRQEDNEQKQLFVEQHKHYLDEIIEQISEFSKRVILADANLDKVLSAYNKHRDKPIREQAENIIHLFTLTNLGAPAAFKYFDTTIDRKRYTSTKEVLDATLIHQSITGLYETRIDLSQLGGD

SEQ ID NO: 153 - protein, 1549 aa, Artificial Sequence
  Description of Artificial Sequence: Synthetic polypeptide
MDKKYSIGLAIGTNSVGWAVITDEYKVPSKKFKVLGNTDRHSIKKNLIGALLFDSGETAEATRLKRTARRRYTRRKNRICYLQEIFSNEMAKVDDSFFHRLEESFLVEEDKKHERHPIFGNIVDEVAYHEKYPTIYHLRKKLVDSTDKADLRLIYLALAHMIKFRGHFLIEGDLNPDNSDVDKLFIQLVQTYNQLFEENPINASGVDAKAILSARLSKSRRLENLIAQLPGEKKNGLFGNLIALSLGLTPNFKSNFDLAEDAKLQLSKDTYDDDLDNLLAQIGDQYADLFLAAKNLSDAILLSDILRVNTEITKAPLSASMIKRYDEHHQDLTLLKALVRQQLPEKYKEIFFDQSKNGYAGYIDGGASQEEFYKFIKPILEKMDGTEELLVKLNREDLLRKQRTFDNGSIPHQIHLGELHAILRRQEDFYPFLKDNREKIEKILTFRIPYYVGPLARGNSRFAWMTRKSEETITPWNFEEVVDKGASAQSFIERMTNFDKNLPNEKVLPKHSLLYEYFTVYNELTKVKYVTEGMRKPAFLSGEQKKAIVDLLFKTNRKVTVKQLKEDYFKKIECFDSVEISGVEDRFNASLGTYHDLLKIIKDKDFLDNEENEDILEDIVLTLTLFEDREMIEERLKTYAHLFDDKVMKQLKRRRYTGWGRLSRKLINGIRDKQSGKTILDFLKSDGFANRNFMQLIHDDSLTFKEDIQKAQVSGQGDSLHEHIANLAGSPAIKKGILQTVKVVDELVKVMGRHKPENIVIEMARENQTTQKGQKNSRERMKRIEEGIKELGSQILKEHPVENTQLQNEKLYLYYLQNGRDMYVDQELDINRLSDYDVDHIVPQSFLKDDSIDNKVLTRSDKNRGKSDNVPSEEVVKKMKNYWRQLLNAKLITQRKFDNLTKAERGGLSELDKAGFIKRQLVETRQITKHVAQILDSRMNTKYDENDKLIREVKVITLKSKLVSDFRKDFQFYKVREINNYHHAHDAYLNAVVGTALSHEYWMRHALTLAKRARDEREVPVGAVLVLNNRVIGEGWNRAIGLHDPTAHAEIMALRQGGLVMQNYRLIDATLYVTFEPCVMCAGAMIHSRIGRVVFGVRNAKTGAAGSLMDVLHYPGMNHRVEITEGILADECAALLCYFFRMPRQVFNAQKKAQSSTDGSSGSETPGTSESATPESSGIKKYPKLESEFVYGDYKVYDVRKMIAKSEQEIGKATAKYFFYSNIMNFFKTEITLANGEIRKRPLIETNGETGEIVWDKGRDFATVRKVLSMPQVNIVKKTEVQTGGFSKESILPKRNSDKLIARKKDWDPKKYGGFDSPTVAYSVLVVAKVEKGKSKKLKSVKELLGITIMERSSFEKNPIDFLEAKGYKEVKKDLIIKLPKYSLFELENGRKRMLASAGELQKGNELALPSKYVNFLYLASHYEKLKGSPEDNEQKQLFVEQHKHYLDEIIEQISEFSKRVILADANLDKVLSAYNKHRDKPIREQAENIIHLFTLTNLGAPAAFKYFDTTIDRKRYTSTKEVLDATLIHQSITGLYETRIDLSQLGGD

SEQ ID NO: 154 - protein, 1555 aa, Artificial Sequence
  Description of Artificial Sequence: Synthetic polypeptide
MDKKYSIGLAIGTNSVGWAVITDEYKVPSKKFKVLGNTDRHSIKKNLIGALLFDSGETAEATRLKRTARRRYTRRKNRICYLQEIFSNEMAKVDDSFFHRLEESFLVEEDKKHERHPIFGNIVDEVAYHEKYPTIYHLRKKLVDSTDKADLRLIYLALAHMIKFRGHFLIEGDLNPDNSDVDKLFIQLVQTYNQLFEENPINASGVDAKAILSARLSKSRRLENLIAQLPGEKKNGLFGNLIALSLGLTPNFKSNFDLAEDAKLQLSKDTYDDDLDNLLAQIGDQYADLFLAAKNLSDAILLSDILRVNTEITKAPLSASMIKRYDEHHQDLTLLKALVRQQLPEKYKEIFFDQSKNGYAGYIDGGASQEEFYKFIKPILEKMDGTEELLVKLNREDLLRKQRTFDNGSIPHQIHLGELHAILRRQEDFYPFLKDNREKIEKILTFRIPYYVGPLARGNSRFAWMTRKSEETITPWNFEEVVDKGASAQSFIERMTNFDKNLPNEKVLPKHSLLYEYFTVYNELTKVKYVTEGMRKPAFLSGEQKKAIVDLLFKTNRKVTVKQLKEDYFKKIECFDSVEISGVEDRFNASLGTYHDLLKIIKDKDFLDNEENEDILEDIVLTLTLFEDREMIEERLKTYAHLFDDKVMKQLKRRRYTGWGRLSRKLINGIRDKQSGKTILDFLKSDGFANRNFMQLIHDDSLTFKEDIQKAQVSGQGDSLHEHIANLAGSPAIKKGILQTVKVVDELVKVMGRHKPENIVIEMARENQTTQKGQKNSRERMKRIEEGIKELGSQILKEHPVENTQLQNEKLYLYYLQNGRDMYVDQELDINRLSDYDVDHIVPQSFLKDDSIDNKVLTRSDKNRGKSDNVPSEEVVKKMKNYWRQLLNAKLITQRKFDNLTKAERGGLSELDKAGFIKRQLVETRQITKHVAQILDSRMNTKYDENDKLIREVKVITLKSKLVSDFRKDFQFYKVREINNYHHAHDAYLNAVVGTALSHEYWMRHALTLAKRARDEREVPVGAVLVLNNRVIGEGWNRAIGLHDPTAHAEIMALRQGGLVMQNYRLIDATLYVTFEPCVMCAGAMIHSRIGRVVFGVRNAKTGAAGSLMDVLHYPGMNHRVEITEGILADECAALLCYFFRMPRQVFNAQKKAQSSTDGSSGSSGSETPGTSESATPESSGGSSIKKYPKLESEFVYGDYKVYDVRKMIAKSEQEIGKATAKYFFYSNIMNFFKTEITLANGEIRKRPLIETNGETGEIVWDKGRDFATVRKVLSMPQVNIVKKTEVQTGGFSKESILPKRNSDKLIARKKDWDPKKYGGFDSPTVAYSVLVVAKVEKGKSKKLKSVKELLGITIMERSSFEKNPIDFLEAKGYKEVKKDLIIKLPKYSLFELENGRKRMLASAGELQKGNELALPSKYVNFLYLASHYEKLKGSPEDNEQKQLFVEQHKHYLDEIIEQISEFSKRVILADANLDKVLSAYNKHRDKPIREQAENIIHLFTLTNLGAPAAFKYFDTTIDRKRYTSTKEVLDATLIHQSITGLYETRIDLSQLGGD

SEQ ID NO: 155 - protein, 1421 aa, Artificial Sequence
  Description of Artificial Sequence: Synthetic polypeptide
MDKKYSIGLAIGTNSVGWAVITDEYKVPSKKFKVLGNTDRHSIKKNLIGALLFDSGETAEATRLKRTARRRYTRRKNRICYLQEIFSNEMAKVDDSFFHRLEESFLVEEDKKHERHPIFGNIVDEVAYHEKYPTIYHLRKKLVDSTDKADLRLIYLALAHMIKFRGHFLIEGDLNPDNSDVDKLFIQLVQTYNQLFEENPINASGVDAKAILSARLSKSRRLENLIAQLPGEKKNGLFGNLIALSLGLTPNFKSNFDLAEDAKLQLSKDTYDDDLDNLLAQIGDQYADLFLAAKNLSDAILLSDILRVNTEITKAPLSASMIKRYDEHHQDLTLLKALVRQQLPEKYKEIFFDQSKNGYAGYIDGGASQEEFYKFIKPILEKMDGTEELLVKLNREDLLRKQRTFDNGSIPHQIHLGELHAILRRQEDFYPFLKDNREKIEKILTFRIPYYVGPLARGNSRFAWMTRKSEETITPWNFEEVVDKGASAQSFIERMTNFDKNLPNEKVLPKHSLLYEYFTVYNELTKVKYVTEGMRKPAFLSGEQKKAIVDLLFKTNRKVTVKQLKEDYFKKIECFDSVEISGVEDRFNASLGTYHDLLKIIKDKDFLDNEENEDILEDIVLTLTLFEDREMIEERLKTYAHLFDDKVMKQLKRRRYTGWGRLSRKLINGIRDKQSGKTILDFLKSDGFANRNFMQLIHDDSLTFKEDIQKAQVSGQGDSLHEHIANLAGSPAIKKGILQTVKVVDELVKVMGRHKPENIVIEMARENQTTQKGQKNSRERMKRIEEGIKELGSEVEFSHEYWMRHALTLAKRARDEREVPVGAVLVLNNRVIGEGWNRAIGLHDPTAHAEIMALRQGGLVMQNYRLIDATLYVTFEPCVMCAGAMIHSRIGRVVFGVRNAKTGAAGSLMDVLHYPGMNHRVEITEGILADECAALLCYFFRMPRQVFNAQKKAQSSTDGGLSELDKAGFIKRQLVETRQITKHVAQILDSRMNTKYDENDKLIREVKVITLKSKLVSDFRKDFQFYKVREINNYHHAHDAYLNAVVGTALIKKYPKLESEFVYGDYKVYDVRKMIAKSEQEIGKATAKYFFYSNIMNFFKTEITLANGEIRKRPLIETNGETGEIVWDKGRDFATVRKVLSMPQVNIVKKTEVQTGGFSKESILPKRNSDKLIARKKDWDPKKYGGFDSPTVAYSVLVVAKVEKGKSKKLKSVKELLGITIMERSSFEKNPIDFLEAKGYKEVKKDLIIKLPKYSLFELENGRKRMLASAGELQKGNELALPSKYVNFLYLASHYEKLKGSPEDNEQKQLFVEQHKHYLDEIIEQISEFSKRVILADANLDKVLSAYNKHRDKPIREQAENIIHLFTLTNLGAPAAFKYFDTTIDRKRYTSTKEVLDATLIHQSITGLYETRIDLSQLGGD

SEQ ID NO: 156 - protein, 1552 aa, Artificial Sequence
  Description of Artificial Sequence: Synthetic polypeptide
MSEVEFSHEYWMRHALTLAKRARDEREVPVGAVLVLNNRVIGEGWNRAIGLHDPTAHAEIMALRQGGLVMQNYRLIDATLYVTFEPCVMCAGAMIHSRIGRVVFGVRNAKTGAAGSLMDVLHYPGMNHRVEITEGILADECAALLCYFFRMPRSGGSSGGSSGSETPGTSESATPESSGGSSGGSDKKYSIGLAIGTNSVGWAVITDEYKVPSKKFKVLGNTDRHSIKKNLIGALLFDSGETAEATRLKRTARRRYTRRKNRICYLQEIFSNEMAKVDDSFFHRLEESFLVEEDKKHERHPIFGNIVDEVAYHEKYPTIYHLRKKLVDSTDKADLRLIYLALAHMIKFRGHFLIEGDLNPDNSDVDKLFIQLVQTYNQLFEENPINASGVDAKAILSARLSKSRRLENLIAQLPGEKKNGLFGNLIALSLGLTPNFKSNFDLAEDAKLQLSKDTYDDDLDNLLAQIGDQYADLFLAAKNLSDAILLSDILRVNTEITKAPLSASMIKRYDEHHQDLTLLKALVRQQLPEKYKEIFFDQSKNGYAGYIDGGASQEEFYKFIKPILEKMDGTEELLVKLNREDLLRKQRTFDNGSIPHQIHLGELHAILRRQEDFYPFLKDNREKIEKILTFRIPYYVGPLARGNSRFAWMTRKSEETITPWNFEEVVDKGASAQSFIERMTNFDKNLPNEKVLPKHSLLYEYFTVYNELTKVKYVTEGMRKPAFLSGEQKKAIVDLLFKTNRKVTVKQLKEDYFKKIECFDSVEISGVEDRFNASLGTYHDLLKIIKDKDFLDNEENEDILEDIVLTLTLFEDREMIEERLKTYAHLFDDKVMKQLKRRRYTGWGRLSRKLINGIRDKQSGKTILDFLKSDGFANRNFMQLIHDDSLTFKEDIQKAQVSGQGDSLHEHIANLAGSPAIKKGILQTVKVVDELVKVMGRHKPENIVIEMARENQTTQKGQKNSRERMKRIEEGIKELGSQILKEHPVENTQLQNEKLYLYYLQNGRDMYVDQELDINRLSDYDVDHIVPQSFLKDDSIDNKVLTRSDKNRGKSDNVPSEEVVKKMKNYWRQLLNAKLITQRKFDNLTKAERGGLSELDKAGFIKRQLVETRQITKHVAQILDSRMNTKYDENDKLIREVKVITLKSKLVSDFRKDFQFYKVREINNYHHAHDAYLNAVVGTALIKKYPKLESEFVYGDYKVYDVRKMIAKSEQEIGKATAKYFFYSNIMNFFKTEITLANGEIRKRPLIETNGETGEIVWDKGRDFATVRKVLSMPQVNIVKKTEVQTGGFSKESILPKRNSDKLIARKKDWDPKKYGGFDSPTVAYSVLVVAKVEKGKSKKLKSVKELLGITIMERSSFEKNPIDFLEAKGYKEVKKDLIIKLPKYSLFELENGRKRMLASAGELQKGNELALPSKYVNFLYLASHYEKLKGSPEDNEQKQLFVEQHKHYLDEIIEQISEFSKRVILADANLDKVLSAYNKHRDKPIREQAENIIHLFTLTNLGAPAAFKYFDTTIDRKRYTSTKEVLDATLIHQSITGLYETRIDLSQLGGD

SEQ ID NO: 157 - protein, 1545 aa, Artificial Sequence
  Description of Artificial Sequence: Synthetic polypeptide
MSEVEFSHEYWMRHALTLAKRARDEREVPVGAVLVLNNRVIGEGWNRTAHAEIMALRQGGLVMQNYRLIDATLYVTFEPCVMCAGAMIHSRIGRVVFGVRNAKTGAAGSLMDVLHYPGMNHRVEITEGILADECAALLCYFFRMPRSGGSSGGSSGSETPGTSESATPESSGGSSGGSDKKYSIGLAIGTNSVGWAVITDEYKVPSKKFKVLGNTDRHSIKKNLIGALLFDSGETAEATRLKRTARRRYTRRKNRICYLQEIFSNEMAKVDDSFFHRLEESFLVEEDKKHERHPIFGNIVDEVAYHEKYPTIYHLRKKLVDSTDKADLRLIYLALAHMIKFRGHFLIEGDLNPDNSDVDKLFIQLVQTYNQLFEENPINASGVDAKAILSARLSKSRRLENLIAQLPGEKKNGLFGNLIALSLGLTPNFKSNFDLAEDAKLQLSKDTYDDDLDNLLAQIGDQYADLFLAAKNLSDAILLSDILRVNTEITKAPLSASMIKRYDEHHQDLTLLKALVRQQLPEKYKEIFFDQSKNGYAGYIDGGASQEEFYKFIKPILEKMDGTEELLVKLNREDLLRKQRTFDNGSIPHQIHLGELHAILRRQEDFYPFLKDNREKIEKILTFRIPYYVGPLARGNSRFAWMTRKSEETITPWNFEEVVDKGASAQSFIERMTNFDKNLPNEKVLPKHSLLYEYFTVYNELTKVKYVTEGMRKPAFLSGEQKKAIVDLLFKTNRKVTVKQLKEDYFKKIECFDSVEISGVEDRFNASLGTYHDLLKIIKDKDFLDNEENEDILEDIVLTLTLFEDREMIEERLKTYAHLFDDKVMKQLKRRRYTGWGRLSRKLINGIRDKQSGKTILDFLKSDGFANRNFMQLIHDDSLTFKEDIQKAQVSGQGDSLHEHIANLAGSPAIKKGILQTVKVVDELVKVMGRHKPENIVIEMARENQTTQKGQKNSRERMKRIEEGIKELGSQILKEHPVENTQLQNEKLYLYYLQNGRDMYVDQELDINRLSDYDVDHIVPQSFLKDDSIDNKVLTRSDKNRGKSDNVPSEEVVKKMKNYWRQLLNAKLITQRKFDNLTKAERGGLSELDKAGFIKRQLVETRQITKHVAQILDSRMNTKYDENDKLIREVKVITLKSKLVSDFRKDFQFYKVREINNYHHAHDAYLNAVVGTALIKKYPKLESEFVYGDYKVYDVRKMIAKSEQEIGKATAKYFFYSNIMNFFKTEITLANGEIRKRPLIETNGETGEIVWDKGRDFATVRKVLSMPQVNIVKKTEVQTGGFSKESILPKRNSDKLIARKKDWDPKKYGGFDSPTVAYSVLVVAKVEKGKSKKLKSVKELLGITIMERSSFEKNPIDFLEAKGYKEVKKDLIIKLPKYSLFELENGRKRMLASAGELQKGNELALPSKYVNFLYLASHYEKLKGSPEDNEQKQLFVEQHKHYLDEIIEQISEFSKRVILADANLDKVLSAYNKHRDKPIREQAENIIHLFTLTNLGAPAAFKYFDTTIDRKRYTSTKEVLDATLIHQSITGLYETRIDLSQLGGD

SEQ ID NO: 158 - protein, 1541 aa, Artificial Sequence
  Description of Artificial Sequence: Synthetic polypeptide
MDKKYSIGLAIGTNSVGWAVITDEYKVPSKKFKVLGNTDRHSIKKNLIGALLFDSGETAEATRLKRTARRRYTRRKNRICYLQEIFSNEMAKVDDSFFHRLEESFLVEEDKKHERHPIFGNIVDEVAYHEKYPTIYHLRKKLVDSTDKADLRLIYLALAHMIKFRGHFLIEGDLNPDNSDVDKLFIQLVQTYNQLFEENPINASGVDAKAILSARLSKSRRLENLIAQLPGEKKNGLFGNLIALSLGLTPNFKSNFDLAEDAKLQLSKDTYDDDLDNLLAQIGDQYADLFLAAKNLSDAILLSDILRVNTEITKAPLSASMIKRYDEHHQDLTLLKALVRQQLPEKYKEIFFDQSKNGYAGYIDGGASQEEFYKFIKPILEKMDGTEELLVKLNREDLLRKQRTFDNGSIPHQIHLGELHAILRRQEDFYPFLKDNREKIEKILTFRIPYYVGPLARGNSRFAWMTRKSEETITPWNFEEVVDKGASAQSFIERMTNFDKNLPNEKVLPKHSLLYEYFTVYNELTKVKYVTEGMRKPAFLSGEQKKAIVDLLFKTNRKVTVKQLKEDYFKKIECFDSVEISGVEDRFNASLGTYHDLLKIIKDKDFLDNEENEDILEDIVLTLTLFEDREMIEERLKTYAHLFDDKVMKQLKRRRYTGWGRLSRKLINGIRDKQSGKTILDFLKSDGFANRNFMQLIHDDSLTFKEDIQKAQVSGQGDSLHEHIANLAGSPAIKKGILQTVKVVDELVKVMGRHKPENIVIEMARENQTTQKGQKNSRERMKRIEEGIKELGSQILKEHPVENTQLQNEKLYLYYLQNGRDMYVDQELDINRLSDYDVDHIVPQSFLKDDSIDNKVLTRSDKNRGKSDNVPSEEVVKKMKNYWRQLLNAKLITQRKFDNLTKAERGGLSELDKAGFIKRQLVETRQITKHVAQILDSRMNTKYDENDKLIREVKVITLKSKLVSDFRKDFQFYKVREINNYHHAHDAYLNAVVGTALIKKYPKGSSGSETPGTSESATPESSGSEVEFSHEYWMRHALTLAKRARDEREVPVGAVLVLNNRVIGEGWNRAIGLHDPTAHAEIMALRQGGLVMQNYRLIDATLYVTFEPCVMCAGAMIHSRIGRVVFGVRNAKTGAAGSLMDVLHYPGMNHRVEITEGILADECAALLCYFFRMPRQLESEFVYGDYKVYDVRKMIAKSEQEIGKATAKYFFYSNIMNFFKTEITLANGEIRKRPLIETNGETGEIVWDKGRDFATVRKVLSMPQVNIVKKTEVQTGGFSKESILPKRNSDKLIARKKDWDPKKYGGFDSPTVAYSVLVVAKVEKGKSKKLKSVKELLGITIMERSSFEKNPIDFLEAKGYKEVKKDLIIKLPKYSLFELENGRKRMLASAGELQKGNELALPSKYVNFLYLASHYEKLKGSPEDNEQKQLFVEQHKHYLDEIIEQISEFSKRVILADANLDKVLSAYNKHRDKPIREQAENIIHLFTLTNLGAPAAFKYFDTTIDRKRYTSTKEVLDATLIHQSITGLYETRIDLSQLGGD

SEQ ID NO: 159 - protein, 1541 aa, Artificial Sequence
  Description of Artificial Sequence: Synthetic polypeptide
MDKKYSIGLAIGTNSVGWAVITDEYKVPSKKFKVLGNTDRHSIKKNLIGALLFDSGETAEATRLKRTARRRYTRRKNRICYLQEIFSNEMAKVDDSFFHRLEESFLVEEDKKHERHPIFGNIVDEVAYHEKYPTIYHLRKKLVDSTDKADLRLIYLALAHMIKFRGHFLIEGDLNPDNSDVDKLFIQLVQTYNQLFEENPINASGVDAKAILSARLSKSRRLENLIAQLPGEKKNGLFGNLIALSLGLTPNFKSNFDLAEDAKLQLSKDTYDDDLDNLLAQIGDQYADLFLAAKNLSDAILLSDILRVNTEITKAPLSASMIKRYDEHHQDLTLLKALVRQQLPEKYKEIFFDQSKNGYAGYIDGGASQEEFYKFIKPILEKMDGTEELLVKLNREDLLRKQRTFDNGSIPHQIHLGELHAILRRQEDFYPFLKDNREKIEKILTFRIPYYVGPLARGNSRFAWMTRKSEETITPWNFEEVVDKGASAQSFIERMTNFDKNLPNEKVLPKHSLLYEYFTVYNELTKVKYVTEGMRKPAFLSGEQKKAIVDLLFKTNRKVTVKQLKEDYFKKIECFDSVEISGVEDRFNASLGTYHDLLKIIKDKDFLDNEENEDILEDIVLTLTLFEDREMIEERLKTYAHLFDDKVMKQLKRRRYTGWGRLSRKLINGIRDKQSGKTILDFLKSDGFANRNFMQLIHDDSLTFKEDIQKAQVSGQGDSLHEHIANLAGSPAIKKGILQTVKVVDELVKVMGRHKPENIVIEMARENQTTQKGQKNSRERMKRIEEGIKELGSQILKEHPVENTQLQNEKLYLYYLQNGRDMYVDQELDINRLSDYDVDHIVPQSFLKDDSIDNKVLTRSDKNRGKSDNVPSEEVVKKMKNYWRQLLNAKLITQRKFDNLTKAERGGLSELDKAGFIKRQLVETRQITKHVAQILDSRMNTKYDENDKLIREVKVITLKSKLVSDFRKDFQFYKVREINNYHHAHDAYLNAVVGTALIKKYPKLGSSGSETPGTSESATPESSGSEVEFSHEYWMRHALTLAKRARDEREVPVGAVLVLNNRVIGEGWNRAIGLHDPTAHAEIMALRQGGLVMQNYRLIDATLYVTFEPCVMCAGAMIHSRIGRVVFGVRNAKTGAAGSLMDVLHYPGMNHRVEITEGILADECAALLCYFFRMPRQESEFVYGDYKVYDVRKMIAKSEQEIGKATAKYFFYSNIMNFFKTEITLANGEIRKRPLIETNGETGEIVWDKGRDFATVRKVLSMPQVNIVKKTEVQTGGFSKESILPKRNSDKLIARKKDWDPKKYGGFDSPTVAYSVLVVAKVEKGKSKKLKSVKELLGITIMERSSFEKNPIDFLEAKGYKEVKKDLIIKLPKYSLFELENGRKRMLASAGELQKGNELALPSKYVNFLYLASHYEKLKGSPEDNEQKQLFVEQHKHYLDEIIEQISEFSKRVILADANLDKVLSAYNKHRDKPIREQAENIIHLFTLTNLGAPAAFKYFDTTIDRKRYTSTKEVLDATLIHQSITGLYETRIDLSQLGGD

SEQ ID NO: 160 - protein, 1541 aa, Artificial Sequence
  Description of Artificial Sequence: Synthetic polypeptide
MDKKYSIGLAIGTNSVGWAVITDEYKVPSKKFKVLGNTDRHSIKKNLIGALLFDSGETAEATRLKRTARRRYTRRKNRICYLQEIFSNEMAKVDDSFFHRLEESFLVEEDKKHERHPIFGNIVDEVAYHEKYPTIYHLRKKLVDSTDKADLRLIYLALAHMIKFRGHFLIEGDLNPDNSDVDKLFIQLVQTYNQLFEENPINASGVDAKAILSARLSKSRRLENLIAQLPGEKKNGLFGNLIALSLGLTPNFKSNFDLAEDAKLQLSKDTYDDDLDNLLAQIGDQYADLFLAAKNLSDAILLSDILRVNTEITKAPLSASMIKRYDEHHQDLTLLKALVRQQLPEKYKEIFFDQSKNGYAGYIDGGASQEEFYKFIKPILEKMDGTEELLVKLNREDLLRKQRTFDNGSIPHQIHLGELHAILRRQEDFYPFLKDNREKIEKILTFRIPYYVGPLARGNSRFAWMTRKSEETITPWNFEEVVDKGASAQSFIERMTNFDKNLPNEKVLPKHSLLYEYFTVYNELTKVKYVTEGMRKPAFLSGEQKKAIVDLLFKTNRKVTVKQLKEDYFKKIECFDSVEISGVEDRFNASLGTYHDLLKIIKDKDFLDNEENEDILEDIVLTLTLFEDREMIEERLKTYAHLFDDKVMKQLKRRRYTGWGRLSRKLINGIRDKQSGKTILDFLKSDGFANRNFMQLIHDDSLTFKEDIQKAQVSGQGDSLHEHIANLAGSPAIKKGILQTVKVVDELVKVMGRHKPENIVIEMARENQTTQKGQKNSRERMKRIEEGIKELGSQILKEHPVENTQLQNEKLYLYYLQNGRDMYVDQELDINRLSDYDVDHIVPQSFLKDDSIDNKVLTRSDKNRGKSDNVPSEEVVKKMKNYWRQLLNAKLITQRKFDNLTKAERGGLSELDKAGFIKRQLVETRQITKHVAQILDSRMNTKYDENDKLIREVKVITLKSKLVSDFRKDFQFYKVREINNYHHAHDAYLNAVVGTALIKKYPKLEGSSGSETPGTSESATPESSGSEVEFSHEYWMRHALTLAKRARDEREVPVGAVLVLNNRVIGEGWNRAIGLHDPTAHAEIMALRQGGLVMQNYRLIDATLYVTFEPCVMCAGAMIHSRIGRVVFGVRNAKTGAAGSLMDVLHYPGMNHRVEITEGILADECAALLCYFFRMPRQSEFVYGDYKVYDVRKMIAKSEQEIGKATAKYFFYSNIMNFFKTEITLANGEIRKRPLIETNGETGEIVWDKGRDFATVRKVLSMPQVNIVKKTEVQTGGFSKESILPKRNSDKLIARKKDWDPKKYGGFDSPTVAYSVLVVAKVEKGKSKKLKSVKELLGITIMERSSFEKNPIDFLEAKGYKEVKKDLIIKLPKYSLFELENGRKRMLASAGELQKGNELALPSKYVNFLYLASHYEKLKGSPEDNEQKQLFVEQHKHYLDEIIEQISEFSKRVILADANLDKVLSAYNKHRDKPIREQAENIIHLFTLTNLGAPAAFKYFDTTIDRKRYTSTKEVLDATLIHQSITGLYETRIDLSQLGGD

SEQ ID NO: 161 - protein, 1541 aa, Artificial Sequence
  Description of Artificial Sequence: Synthetic polypeptide
MDKKYSIGLAIGTNSVGWAVITDEYKVPSKKFKVLGNTDRHSIKKNLIGALLFDSGETAEATRLKRTARRRYTRRKNRICYLQEIFSNEMAKVDDSFFHRLEESFLVEEDKKHERHPIFGNIVDEVAYHEKYPTIYHLRKKLVDSTDKADLRLIYLALAHMIKFRGHFLIEGDLNPDNSDVDKLFIQLVQTYNQLFEENPINASGVDAKAILSARLSKSRRLENLIAQLPGEKKNGLFGNLIALSLGLTPNFKSNFDLAEDAKLQLSKDTYDDDLDNLLAQIGDQYADLFLAAKNLSDAILLSDILRVNTEITKAPLSASMIKRYDEHHQDLTLLKALVRQQLPEKYKEIFFDQSKNGYAGYIDGGASQEEFYKFIKPILEKMDGTEELLVKLNREDLLRKQRTFDNGSIPHQIHLGELHAILRRQEDFYPFLKDNREKIEKILTFRIPYYVGPLARGNSRFAWMTRKSEETITPWNFEEVVDKGASAQSFIERMTNFDKNLPNEKVLPKHSLLYEYFTVYNELTKVKYVTEGMRKPAFLSGEQKKAIVDLLFKTNRKVTVKQLKEDYFKKIECFDSVEISGVEDRFNASLGTYHDLLKIIKDKDFLDNEENEDILEDIVLTLTLFEDREMIEERLKTYAHLFDDKVMKQLKRRRYTGWGRLSRKLINGIRDKQSGKTILDFLKSDGFANRNFMQLIHDDSLTFKEDIQKAQVSGQGDSLHEHIANLAGSPAIKKGILQTVKVVDELVKVMGRHKPENIVIEMARENQTTQKGQKNSRERMKRIEEGIKELGSQILKEHPVENTQLQNEKLYLYYLQNGRDMYVDQELDINRLSDYDVDHIVPQSFLKDDSIDNKVLTRSDKNRGKSDNVPSEEVVKKMKNYWRQLLNAKLITQRKFDNLTKAERGGLSELDKAGFIKRQLVETRQITKHVAQILDSRMNTKYDENDKLIREVKVITLKSKLVSDFRKDFQFYKVREINNYHHAHDAYLNAVVGTALIKKYPKLESGSSGSETPGTSESATPESSGSEVEFSHEYWMRHALTLAKRARDEREVPVGAVLVLNNRVIGEGWNRAIGLHDPTAHAEIMALRQGGLVMQNYRLIDATLYVTFEPCVMCAGAMIHSRIGRVVFGVRNAKTGAAGSLMDVLHYPGMNHRVEITEGILADECAALLCYFFRMPRQEFVYGDYKVYDVRKMIAKSEQEIGKATAKYFFYSNIMNFFKTEITLANGEIRKRPLIETNGETGEIVWDKGRDFATVRKVLSMPQVNIVKKTEVQTGGFSKESILPKRNSDKLIARKKDWDPKKYGGFDSPTVAYSVLVVAKVEKGKSKKLKSVKELLGITIMERSSFEKNPIDFLEAKGYKEVKKDLIIKLPKYSLFELENGRKRMLASAGELQKGNELALPSKYVNFLYLASHYEKLKGSPEDNEQKQLFVEQHKHYLDEIIEQISEFSKRVILADANLDKVLSAYNKHRDKPIREQAENIIHLFTLTNLGAPAAFKYFDTTIDRKRYTSTKEVLDATLIHQSITGLYETRIDLSQLGGD

SEQ ID NO: 162 - protein, 1541 aa, Artificial Sequence
  Description of Artificial Sequence: Synthetic polypeptide
MDKKYSIGLAIGTNSVGWAVITDEYKVPSKKFKVLGNTDRHSIKKNLIGALLFDSGETAEATRLKRTARRRYTRRKNRICYLQEIFSNEMAKVDDSFFHRLEESFLVEEDKKHERHPIFGNIVDEVAYHEKYPTIYHLRKKLVDSTDKADLRLIYLALAHMIKFRGHFLIEGDLNPDNSDVDKLFIQLVQTYNQLFEENPINASGVDAKAILSARLSKSRRLENLIAQLPGEKKNGLFGNLIALSLGLTPNFKSNFDLAEDAKLQLSKDTYDDDLDNLLAQIGDQYADLFLAAKNLSDAILLSDILRVNTEITKAPLSASMIKRYDEHHQDLTLLKALVRQQLPEKYKEIFFDQSKNGYAGYIDGGASQEEFYKFIKPILEKMDGTEELLVKLNREDLLRKQRTFDNGSIPHQIHLGELHAILRRQEDFYPFLKDNREKIEKILTFRIPYYVGPLARGNSRFAWMTRKSEETITPWNFEEVVDKGASAQSFIERMTNFDKNLPNEKVLPKHSLLYEYFTVYNELTKVKYVTEGMRKPAFLSGEQKKAIVDLLFKTNRKVTVKQLKEDYFKKIECFDSVEISGVEDRFNASLGTYHDLLKIIKDKDFLDNEENEDILEDIVLTLTLFEDREMIEERLKTYAHLFDDKVMKQLKRRRYTGWGRLSRKLINGIRDKQSGKTILDFLKSDGFANRNFMQLIHDDSLTFKEDIQKAQVSGQGDSLHEHIANLAGSPAIKKGILQTVKVVDELVKVMGRHKPENIVIEMARENQTTQKGQKNSRERMKRIEEGIKELGGSSGSETPGTSESATPESSGSEVEFSHEYWMRHALTLAKRARDEREVPVGAVLVLNNRVIGEGWNRAIGLHDPTAHAEIMALRQGGLVMQNYRLIDATLYVTFEPCVMCAGAMIHSRIGRVVFGVRNAKTGAAGSLMDVLHYPGMNHRVEITEGILADECAALLCYFFRMPRQSQILKEHPVENTQLQNEKLYLYYLQNGRDMYVDQELDINRLSDYDVDHIVPQSFLKDDSIDNKVLTRSDKNRGKSDNVPSEEVVKKMKNYWRQLLNAKLITQRKFDNLTKAERGGLSELDKAGFIKRQLVETRQITKHVAQILDSRMNTKYDENDKLIREVKVITLKSKLVSDFRKDFQFYKVREINNYHHAHDAYLNAVVGTALIKKYPKLESEFVYGDYKVYDVRKMIAKSEQEIGKATAKYFFYSNIMNFFKTEITLANGEIRKRPLIETNGETGEIVWDKGRDFATVRKVLSMPQVNIVKKTEVQTGGFSKESILPKRNSDKLIARKKDWDPKKYGGFDSPTVAYSVLVVAKVEKGKSKKLKSVKELLGITIMERSSFEKNPIDFLEAKGYKEVKKDLIIKLPKYSLFELENGRKRMLASAGELQKGNELALPSKYVNFLYLASHYEKLKGSPEDNEQKQLFVEQHKHYLDEIIEQISEFSKRVILADANLDKVLSAYNKHRDKPIREQAENIIHLFTLTNLGAPAAFKYFDTTIDRKRYTSTKEVLDATLIHQSITGLYETRIDLSQLGGD

SEQ ID NO: 163 - protein, 1541 aa, Artificial Sequence
  Description of Artificial Sequence: Synthetic polypeptide
MDKKYSIGLAIGTNSVGWAVITDEYKVPSKKFKVLGNTDRHSIKKNLIGALLFDSGETAEATRLKRTARRRYTRRKNRICYLQEIFSNEMAKVDDSFFHRLEESFLVEEDKKHERHPIFGNIVDEVAYHEKYPTIYHLRKKLVDSTDKADLRLIYLALAHMIKFRGHFLIEGDLNPDNSDVDKLFIQLVQTYNQLFEENPINASGVDAKAILSARLSKSRRLENLIAQLPGEKKNGLFGNLIALSLGLTPNFKSNFDLAEDAKLQLSKDTYDDDLDNLLAQIGDQYADLFLAAKNLSDAILLSDILRVNTEITKAPLSASMIKRYDEHHQDLTLLKALVRQQLPEKYKEIFFDQSKNGYAGYIDGGASQEEFYKFIKPILEKMDGTEELLVKLNREDLLRKQRTFDNGSIPHQIHLGELHAILRRQEDFYPFLKDNREKIEKILTFRIPYYVGPLARGNSRFAWMTRKSEETITPWNFEEVVDKGASAQSFIERMTNFDKNLPNEKVLPKHSLLYEYFTVYNELTKVKYVTEGMRKPAFLSGEQKKAIVDLLFKTNRKVTVKQLKEDYFKKIECFDSVEISGVEDRFNASLGTYHDLLKIIKDKDFLDNEENEDILEDIVLTLTLFEDREMIEERLKTYAHLFDDKVMKQLKRRRYTGWGRLSRKLINGIRDKQSGKTILDFLKSDGFANRNFMQLIHDDSLTFKEDIQKAQVSGQGDSLHEHIANLAGSPAIKKGILQTVKVVDELVKVMGRHKPENIVIEMARENQTTQKGQKNSRERMKRIEEGIKELGSSGSETPGTSESATPESSGSEVEFSHEYWMRHALTLAKRARDEREVPVGAVLVLNNRVIGEGWNRAIGLHDPTAHAEIMALRQGGLVMQNYRLIDATLYVTFEPCVMCAGAMIHSRIGRVVFGVRNAKTGAAGSLMDVLHYPGMNHRVEITEGILADECAALLCYFFRMPRQGSQILKEHPVENTQLQNEKLYLYYLQNGRDMYVDQELDINRLSDYDVDHIVPQSFLKDDSIDNKVLTRSDKNRGKSDNVPSEEVVKKMKNYWRQLLNAKLITQRKFDNLTKAERGGLSELDKAGFIKRQLVETRQITKHVAQILDSRMNTKYDENDKLIREVKVITLKSKLVSDFRKDFQFYKVREINNYHHAHDAYLNAVVGTALIKKYPKLESEFVYGDYKVYDVRKMIAKSEQEIGKATAKYFFYSNIMNFFKTEITLANGEIRKRPLIETNGETGEIVWDKGRDFATVRKVLSMPQVNIVKKTEVQTGGFSKESILPKRNSDKLIARKKDWDPKKYGGFDSPTVAYSVLVVAKVEKGKSKKLKSVKELLGITIMERSSFEKNPIDFLEAKGYKEVKKDLIIKLPKYSLFELENGRKRMLASAGELQKGNELALPSKYVNFLYLASHYEKLKGSPEDNEQKQLFVEQHKHYLDEIIEQISEFSKRVILADANLDKVLSAYNKHRDKPIREQAENIIHLFTLTNLGAPAAFKYFDTTIDRKRYTSTKEVLDATLIHQSITGLYETRIDLSQLGGD

SEQ ID NO: 164 - protein, 1541 aa, Artificial Sequence
  Description of Artificial Sequence: Synthetic polypeptide
MDKKYSIGLAIGTNSVGWAVITDEYKVPSKKFKVLGNTDRHSIKKNLIGALLFDSGETAEATRLKRTARRRYTRRKNRICYLQEIFSNEMAKVDDSFFHRLEESFLVEEDKKHERHPIFGNIVDEVAYHEKYPTIYHLRKKLVDSTDKADLRLIYLALAHMIKFRGHFLIEGDLNPDNSDVDKLFIQLVQTYNQLFEENPINASGVDAKAILSARLSKSRRLENLIAQLPGEKKNGLFGNLIALSLGLTPNFKSNFDLAEDAKLQLSKDTYDDDLDNLLAQIGDQYADLFLAAKNLSDAILLSDILRVNTEITKAPLSASMIKRYDEHHQDLTLLKALVRQQLPEKYKEIFFDQSKNGYAGYIDGGASQEEFYKFIKPILEKMDGTEELLVKLNREDLLRKQRTFDNGSIPHQIHLGELHAILRRQEDFYPFLKDNREKIEKILTFRIPYYVGPLARGNSRFAWMTRKSEETITPWNFEEVVDKGASAQSFIERMTNFDKNLPNEKVLPKHSLLYEYFTVYNELTKVKYVTEGMRKPAFLSGEQKKAIVDLLFKTNRKVTVKQLKEDYFKKIECFDSVEISGVEDRFNASLGTYHDLLKIIKDKDFLDNEENEDILEDIVLTLTLFEDREMIEERLKTYAHLFDDKVMKQLKRRRYTGWGRLSRKLINGIRDKQSGKTILDFLKSDGFANRNFMQLIHDDSLTFKEDIQKAQVSGQGDSLHEHIANLAGSPAIKKGILQTVKVVDELVKVMGRHKPENIVIEMARENQTTQKGQKNSRERMKRIEEGIKEGSSGSETPGTSESATPESSGSEVEFSHEYWMRHALTLAKRARDEREVPVGAVLVLNNRVIGEGWNRAIGLHDPTAHAEIMALRQGGLVMQNYRLIDATLYVTFEPCVMCAGAMIHSRIGRVVFGVRNAKTGAAGSLMDVLHYPGMNHRVEITEGILADECAALLCYFFRMPRQLGSQILKEHPVENTQLQNEKLYLYYLQNGRDMYVDQELDINRLSDYDVDHIVPQSFLKDDSIDNKVLTRSDKNRGKSDNVPSEEVVKKMKNYWRQLLNAKLITQRKFDNLTKAERGGLSELDKAGFIKRQLVETRQITKHVAQILDSRMNTKYDENDKLIREVKVITLKSKLVSDFRKDFQFYKVREINNYHHAHDAYLNAVVGTALIKKYPKLESEFVYGDYKVYDVRKMIAKSEQEIGKATAKYFFYSNIMNFFKTEITLANGEIRKRPLIETNGETGEIVWDKGRDFATVRKVLSMPQVNIVKKTEVQTGGFSKESILPKRNSDKLIARKKDWDPKKYGGFDSPTVAYSVLVVAKVEKGKSKKLKSVKELLGITIMERSSFEKNPIDFLEAKGYKEVKKDLIIKLPKYSLFELENGRKRMLASAGELQKGNELALPSKYVNFLYLASHYEKLKGSPEDNEQKQLFVEQHKHYLDEIIEQISEFSKRVILADANLDKVLSAYNKHRDKPIREQAENIIHLFTLTNLGAPAAFKYFDTTIDRKRYTSTKEVLDATLIHQSITGLYETRIDLSQLGGD

SEQ ID NO: 165 - protein, 1484 aa, Artificial Sequence
  Description of Artificial Sequence: Synthetic polypeptide
MDKKYSIGLAIGTNSVGWAVITDEYKVPSKKFKVLGNTDRHSIKKNLIGALLFDSGETAEATRLKRTARRRYTRRKNRICYLQEIFSNEMAKVDDSFFHRLEESFLVEEDKKHERHPIFGNIVDEVAYHEKYPTIYHLRKKLVDSTDKADLRLIYLALAHMIKFRGHFLIEGDLNPDNSDVDKLFIQLVQTYNQLFEENPINASGVDAKAILSARLSKSRRLENLIAQLPGEKKNGLFGNLIALSLGLTPNFKSNFDLAEDAKLQLSKDTYDDDLDNLLAQIGDQYADLFLAAKNLSDAILLSDILRVNTEITKAPLSASMIKRYDEHHQDLTLLKALVRQQLPEKYKEIFFDQSKNGYAGYIDGGASQEEFYKFIKPILEKMDGTEELLVKLNREDLLRKQRTFDNGSIPHQIHLGELHAILRRQEDFYPFLKDNREKIEKILTFRIPYYVGPLARGNSRFAWMTRKSEETITPWNFEEVVDKGASAQSFIERMTNFDKNLPNEKVLPKHSLLYEYFTVYNELTKVKYVTEGMRKPAFLSGEQKKAIVDLLFKTNRKVTVKQLKEDYFKKIECFDSVEISGVEDRFNASLGTYHDLLKIIKDKDFLDNEENEDILEDIVLTLTLFEDREMIEERLKTYAHLFDDKVMKQLKRRRYTGWGRLSRKLINGIRDKQSGKTILDFLKSDGFANRNFMQLIHDDSLTFKEDIQKAQVSGQGDSLHEHIANLAGSPAIKKGILQTVKVVDELVKVMGRHKPENIVIEMARENQTTQKGQKNSRERMKRIEEGIKELGSQILKEHPVENTQLQNEKLYLYYLQNGRDMYVDQELDINRLSDYDVDHIVPQSFLKDDSIDNKVLTRSDKNRGKSDNVPSEEVVKKMKNYWRQLLNAKLITQRKFDNLTKAERGGLSELDKAGFIKRQLVETRQITKHVAQILDSRMNTKYDENDKLIREVKVITLKSKLVSDFRKDFQFYKVREINNYHHAHDAYLNAVVGTALIKKYPKLESEFVYGDYKVYSSGSEVEFSHEYWMRHALTLAKRARDEREVPVGAVLVLNNRVIGEGWNRAIGLHDPTAHAEIMALRQGGLVMQNYRLIDATLYVTFEPCVMCAGAMIHSRIGRVVFGVRNAKTGAAGSLMDVLHYPGMNHRVEITEGILADECAALLCYFFRMPRQVFNAQKKAQSSTDGEIVWDKGRDFATVRKVLSMPQVNIVKKTEVQTGGFSKESILPKRNSDKLIARKKDWDPKKYGGFDSPTVAYSVLVVAKVEKGKSKKLKSVKELLGITIMERSSFEKNPIDFLEAKGYKEVKKDLIIKLPKYSLFELENGRKRMLASAGELQKGNELALPSKYVNFLYLASHYEKLKGSPEDNEQKQLFVEQHKHYLDEIIEQISEFSKRVILADANLDKVLSAYNKHRDKPIREQAENIIHLFTLTNLGAPAAFKYFDTTIDRKRYTSTKEVLDATLIHQSITGLYETRIDLSQLGGD

SEQ ID NO: 166 - protein, 1554 aa, Artificial Sequence
  Description of Artificial Sequence: Synthetic polypeptide
MDKKYSIGLAIGTNSVGWAVITDEYKVPSKKFKVLGNTDRHSIKKNLIGALLFDSGETAEATRLKRTARRRYTRRKNRICYLQEIFSNEMAKVDDSFFHRLEESFLVEEDKKHERHPIFGNIVDEVAYHEKYPTIYHLRKKLVDSTDKADLRLIYLALAHMIKFRGHFLIEGDLNPDNSDVDKLFIQLVQTYNQLFEENPINASGVDAKAILSARLSKSRRLENLIAQLPGEKKNGLFGNLIALSLGLTPNFKSNFDLAEDAKLQLSKDTYDDDLDNLLAQIGDQYADLFLAAKNLSDAILLSDILRVNTEITKAPLSASMIKRYDEHHQDLTLLKALVRQQLPEKYKEIFFDQSKNGYAGYIDGGASQEEFYKFIKPILEKMDGTEELLVKLNREDLLRKQRTFDNGSIPHQIHLGELHAILRRQEDFYPFLKDNREKIEKILTFRIPYYVGPLARGNSRFAWMTRKSEETITPWNFEEVVDKGASAQSFIERMTNFDKNLPNEKVLPKHSLLYEYFTVYNELTKVKYVTEGMRKPAFLSGEQKKAIVDLLFKTNRKVTVKQLKEDYFKKIECFDSVEISGVEDRFNASLGTYHDLLKIIKDKDFLDNEENEDILEDIVLTLTLFEDREMIEERLKTYAHLFDDKVMKQLKRRRYTGWGRLSRKLINGIRDKQSGKTILDFLKSDGFANRNFMQLIHDDSLTFKEDIQKAQVSGQGDSLHEHIANLAGSPAIKKGILQTVKVVDELVKVMGRHKPENIVIEMARENQTTQKGQKNSRERMKRIEEGIKELGSQILKEHPVENTQLQNEKLYLYYLQNGRDMYVDQELDINRLSDYDVDHIVPQSFLKDDSIDNKVLTRSDKNRGKSDNVPSEEVVKKMKNYWRQLLNAKLITQRKFDNLTKAERGGLSELDKAGFIKRQLVETRQITKHVAQILDSRMNTKYDENDKLIREVKVITLKSKLVSDFRKDFQFYKVREINNYHHAHDAYLNAVVGTALIKKYPKLESEFVYGDYKVYDVRKMIAKSEQEIGKATAKYFFYSNIMNFFKTEITLANGEIRKRPLIETNMNHRVEITEGILADECAALLCYFFRMPRQVFNAQKKAQSSTDGSSGSETPGTSESATPESSGSEVEFSHEYWMRHALTLAKRARDEREVPVGAVLVLNNRVIGEGWNRAIGLHDPTAHAEIMALRQGGLVMQNYRLIDATLYVTFEPCVMCAGAMIHSRIGRVVFGVRNAKTGAAGSLMDVLHYPGGETGEIVWDKGRDFATVRKVLSMPQVNIVKKTEVQTGGFSKESILPKRNSDKLIARKKDWDPKKYGGFDSPTVAYSVLVVAKVEKGKSKKLKSVKELLGITIMERSSFEKNPIDFLEAKGYKEVKKDLIIKLPKYSLFELENGRKRMLASAGELQKGNELALPSKYVNFLYLASHYEKLKGSPEDNEQKQLFVEQHKHYLDEIIEQISEFSKRVILADANLDKVLSAYNKHRDKPIREQAENIIHLFTLTNLGAPAAFKYFDTTIDRKRYTSTKEVLDATLIHQSITGLYETRIDLSQLGGD

SEQ ID NO: 167 - protein, 1554 aa, Artificial Sequence
  Description of Artificial Sequence: Synthetic polypeptide
MDKKYSIGLAIGTNSVGWAVITDEYKVPSKKFKVLGNTDRHSIKKNLIGALLFDSGETAEATRLKRTARRRYTRRKNRICYLQEIFSNEMAKVDDSFFHRLEESFLVEEDKKHERHPIFGNIVDEVAYHEKYPTIYHLRKKLVDSTDKADLRLIYLALAHMIKFRGHFLIEGDLNPDNSDVDKLFIQLVQTYNQLFEENPINASGVDAKAILSARLSKSRRLENLIAQLPGEKKNGLFGNLIALSLGLTPNFKSNFDLAEDAKLQLSKDTYDDDLDNLLAQIGDQYADLFLAAKNLSDAILLSDILRVNTEITKAPLSASMIKRYDEHHQDLTLLKALVRQQLPEKYKEIFFDQSKNGYAGYIDGGASQEEFYKFIKPILEKMDGTEELLVKLNREDLLRKQRTFDNGSIPHQIHLGELHAILRRQEDFYPFLKDNREKIEKILTFRIPYYVGPLARGNSRFAWMTRKSEETITPWNFEEVVDKGASAQSFIERMTNFDKNLPNEKVLPKHSLLYEYFTVYNELTKVKYVTEGMRKPAFLSGEQKKAIVDLLFKTNRKVTVKQLKEDYFKKIECFDSVEISGVEDRFNASLGTYHDLLKIIKDKDFLDNEENEDILEDIVLTLTLFEDREMIEERLKTYAHLFDDKVMKQLKRRRYTGWGRLSRKLINGIRDKQSGKTILDFLKSDGFANRNFMQLIHDDSGSSGSETPGTSESATPESSGSEVEFSHEYWMRHALTLAKRARDEREVPVGAVLVLNNRVIGEGWNRAIGLHDPTAHAEIMALRQGGLVMQNYRLIDATLYVTFEPCVMCAGAMIHSRIGRVVFGVRNAKTGAAGSLMDVLHYPGMNHRVEITEGILADECAALLCYFFRMPRQVFNAQKKAQSSTDLTFKEDIQKAQVSGQGDSLHEHIANLAGSPAIKKGILQTVKVVDELVKVMGRHKPENIVIEMARENQTTQKGQKNSRERMKRIEEGIKELGSQILKEHPVENTQLQNEKLYLYYLQNGRDMYVDQELDINRLSDYDVDHIVPQSFLKDDSIDNKVLTRSDKNRGKSDNVPSEEVVKKMKNYWRQLLNAKLITQRKFDNLTKAERGGLSELDKAGFIKRQLVETRQITKHVAQILDSRMNTKYDENDKLIREVKVITLKSKLVSDFRKDFQFYKVREINNYHHAHDAYLNAVVGTALIKKYPKLESEFVYGDYKVYDVRKMIAKSEQEIGKATAKYFFYSNIMNFFKTEITLANGEIRKRPLIETNGETGEIVWDKGRDFATVRKVLSMPQVNIVKKTEVQTGGFSKESILPKRNSDKLIARKKDWDPKKYGGFDSPTVAYSVLVVAKVEKGKSKKLKSVKELLGITIMERSSFEKNPIDFLEAKGYKEVKKDLIIKLPKYSLFELENGRKRMLASAGELQKGNELALPSKYVNFLYLASHYEKLKGSPEDNEQKQLFVEQHKHYLDEIIEQISEFSKRVILADANLDKVLSAYNKHRDKPIREQAENIIHLFTLTNLGAPAAFKYFDTTIDRKRYTSTKEVLDATLIHQSITGLYETRIDLSQLGGD

SEQ ID NO: 168 - protein, 1554 aa, Artificial Sequence
  Description of Artificial Sequence: Synthetic polypeptide
MDKKYSIGLAIGTNSVGWAVITDEYKVPSKKFKVLGNTDRHSIKKNLIGALLFDSGETAEATRLKRTARRRYTRRKNRICYLQEIFSNEMAKVDDSFFHRLEESFLVEEDKKHERHPIFGNIVDEVAYHEKYPTIYHLRKKLVDSTDKADLRLIYLALAHMIKFRGHFLIEGDLNPDNSDVDKLFIQLVQTYNQLFEENPINASGVDAKAILSARLSKSRRLENLIAQLPGEKKNGLFGNLIALSLGLTPNFKSNFDLAEDAKLQLSKDTYDDDLDNLLAQIGDQYADLFLAAKNLSDAILLSDILRVNTEITKAPLSASMIKRYDEHHQDLTLLKALVRQQLPEKYKEIFFDQSKNGYAGYIDGGASQEEFYKFIKPILEKMDGTEELLVKLNREDLLRKQRTFDNGSIPHQIHLGELHAILRRQEDFYPFLKDNREKIEKILTFRIPYYVGPLARGNSRFAWMTRKSEETITPWNFEEVVDKGASAQSFIERMTNFDKNLPNEKVLPKHSLLYEYFTVYNELTKVKYVTEGMRKPAFLSGEQKKAIVDLLFKTNRKVTVKQLKEDYFKKIECFDSVEISGVEDRFNASLGTYHDLLKIIKDKDFLDNEENEDILEDIVLTLTLFEDREMIEERLKTYAHLFDDKVMKQLKRRRYTGWGRLSRKLINGIRDKQSGKTILDFLKSDGFANRNFMQLIHDDSLTFKEDIQKAQVSGQGDSLHEHIANLAGSPAIKKGILQTVKVVDELVKVMGRHKPENIVIEMARENQTTQKGQKNSRERMKRIEEGIKELGSQILKEHPVENTQLQNEKLYLYYLQNGRDMYVDQELDINRLSDYDVDHIVPQSFLKDDSIDNKVLTRSDKNRGKSDNVPSEEVVKKMKNYWRQLLNAKLITQRKFDNLTKAERGGLSELDKAGFIKRQLVETRQITKHVAQILDSRMNTKYDENDKLIREVKVITLKSKLVSDFRKDFQFYKVREINNYHHAHDAYLNAVVGTALIKKYPKLESEFVYGDYKVYDVRKMIAKSEQEIGKATAKYFFYSNIMNFFKTEITLANGEIRKRPLIETNGETGEIVWDKGRDFATVRKVLSMPQVNIVKKTEVQTGGFSKESILPKRNSDKLIARKKDWDPKKYGGFDSPTVAYSVLVVAKVEKGKSKKLKSVKELLGITIMERSSFEKNPIDFLEAKGYKEVKKDLIIKLPKYSLFELENGRKRMLASAGELQKGNELALPSKYVNFLYLASHYEKLKGSMNHRVEITEGILADECAALLCYFFRMPRQVFNAQKKAQSSTDGSSGSETPGTSESATPESSGSEVEFSHEYWMRHALTLAKRARDEREVPVGAVLVLNNRVIGEGWNRAIGLHDPTAHAEIMALRQGGLVMQNYRLIDATLYVTFEPCVMCAGAMIHSRIGRVVFGVRNAKTGAAGSLMDVLHYPGPEDNEQKQLFVEQHKHYLDEIIEQISEFSKRVILADANLDKVLSAYNKHRDKPIREQAENIIHLFTLTNLGAPAAFKYFDTTIDRKRYTSTKEVLDATLIHQSITGLYETRIDLSQLGGD

SEQ ID NO: 169 - protein, 1554 aa, Artificial Sequence
  Description of Artificial Sequence: Synthetic polypeptide
MDKKYSIGLAIGTNSVGWAVITDEYKVPSKKFKVLGNTDRHSIKKNLIGALLFDSGETAEATRLKRTARRRYTRRKNRICYLQEIFSNEMAKVDDSFFHRLEESFLVEEDKKHERHPIFGNIVDEVAYHEKYPTIYHLRKKLVDSTDKADLRLIYLALAHMIKFRGHFLIEGDLNPDNSDVDKLFIQLVQTYNQLFEENPINASGVDAKAILSARLSKSRRLENLIAQLPGEKKNGLFGNLIALSLGLTPNFKSNFDLAEDAKLQLSKDTYDDDLDNLLAQIGDQYADLFLAAKNLSDAILLSDILRVNTEITKAPLSASMIKRYDEHHQDLTLLKALVRQQLPEKYKEIFFDQSKNGYAGYIDGGASQEEFYKFIKPILEKMDGTEELLVKLNREDLLRKQRTFDNGSIPHQIHLGELHAILRRQEDFYPFLKDNREKIEKILTFRIPYYVGPLARGNSRFAWMTRKSEETITPWNFEEVVDKGASAQSFIERMTNFDKNLPNEKVLPKHSLLYEYFTVYNELTKVKYVTEGMRKPAFLSGEQKKAIVDLLFKTNRKVTVKQLKEDYFKKIECFDSVEISGVEDRFNASLGTYHDLLKIIKDKDFLDNEENEDILEDIVLTLTLFEDREMIEERLKTYAHLFDDKVMKQLKRRRYTGWGRLSRKLINGIRDKQSGKTILDFLKSDGFANRNFMQLIHDDSLTFKEDIQKAQVSGQGDSLHEHIANLAGSPAIKKGILQTVKVVDELVKVMGRHKPENIVIEMARENQTTQKGQKNSRERMKRIEEGIKELGSQILKEHPVENTQLQNEKLYLYYLQNGRDMYVDQELDINRLSDYDVDHIVPQSFLKDDSIDNKVLTRSDKNRGKSDNVPSEEVVKKMKNYWRQLLNAKLITQRKFDNLTKAERGGLSELDKAGFIKRQLVETRQITKHVAQILDSRMNTKYDENDKLIREVKVITLKSKLVSDFRKDFQFYKVREINNYHHAHDAYLNAVVGTALIKKYPKLESEFVYGDYKVYDVRKMIAKSEQEIGKATAKYFFYSNIMNFFKTEITLAMNHRVEITEGILADECAALLCYFFRMPRQVFNAQKKAQSSTDGSSGSETPGTSESATPESSGSEVEFSHEYWMRHALTLAKRARDEREVPVGAVLVLNNRVIGEGWNRAIGLHDPTAHAEIMALRQGGLVMQNYRLIDATLYVTFEPCVMCAGAMIHSRIGRVVFGVRNAKTGAAGSLMDVLHYPGNGEIRKRPLIETNGETGEIVWDKGRDFATVRKVLSMPQVNIVKKTEVQTGGFSKESILPKRNSDKLIARKKDWDPKKYGGFDSPTVAYSVLVVAKVEKGKSKKLKSVKELLGITIMERSSFEKNPIDFLEAKGYKEVKKDLIIKLPKYSLFELENGRKRMLASAGELQKGNELALPSKYVNFLYLASHYEKLKGSPEDNEQKQLFVEQHKHYLDEIIEQISEFSKRVILADANLDKVLSAYNKHRDKPIREQAENIIHLFTLTNLGAPAAFKYFDTTIDRKRYTSTKEVLDATLIHQSITGLYETRIDLSQLGGD

SEQ ID NO: 170 - protein, 1554 aa, Artificial Sequence
  Description of Artificial Sequence: Synthetic polypeptide
MDKKYSIGLAIGTNSVGWAVITDEYKVPSKKFKVLGNTDRHSIKKNLIGALLFDSGETAEATRLKRTARRRYTRRKNRICYLQEIFSNEMAKVDDSFFHRLEESFLVEEDKKHERHPIFGNIVDEVAYHEKYPTIYHLRKKLVDSTDKADLRLIYLALAHMIKFRGHFLIEGDLNPDNSDVDKLFIQLVQTYNQLFEENPINASGVDAKAILSARLSKSRRLENLIAQLPGEKKNGLFGNLIALSLGLTPNFKSNFDLAEDAKLQLSKDTYDDDLDNLLAQIGDQYADLFLAAKNLSDAILLSDILRVNTEITKAPLSASMIKRYDEHHQDLTLLKALVRQQLPEKYKEIFFDQSKNGYAGYIDGGASQEEFYKFIKPILEKMDGTEELLVKLNREDLLRKQRTFDNGSIPHQIHLGELHAILRRQEDFYPFLKDNREKIEKILTFRIPYYVGPLARGNSRFAWMTRKSEETITPWNFEEVVDKGASAQSFIERMTNFDKNLPNEKVLPKHSLLYEYFTVYNELTKVKYVTEGMRKPAFLSGEQKKAIVDLLFKTNRKVTVKQLKEDYFKKIECFDSVEISGVEDRFNASLGTYHDLLKIIKDKDFLDNEENEDILEDIVLTLTLFEDREMIEERLKTYAHLFDDKVMKQLKRRRYTGWGRLSRKLINGIRDKQSGKTILDFLKSDGFANRNFMQLIHDDSLTFKEDIQKAQVSGQGDSLHEHIANLAGSPAIKKGILQTVKVVDELVKVMGRHKPENIVIEMARENQTTQKGQKNSRERMKRIEEGIKELGSQILKEHPVENTQLQNEKLYLYYLQNGRDMYVDQELDINRLSDYDVDHIVPQSFLKDDSIDNKVLTRSDKNRGKSDNVPSEEVVKKMKNYWRQLLNAKLITQRKFDNLTKAERGGLSELDKAGFIKRQLVETRQITKHVAQILDSRMNTKYDENDKLIREVKVITLKSKLVSDFRKDFQFYKVREINNYHHAHDAYLNAVVGTALIKKYPKLESEFVYGDYKVYDVRKMIAKSEQEIGKATAKYFFYSMNHRVEITEGILADECAALLCYFFRMPRQVFNAQKKAQSSTDGSSGSETPGTSESATPESSGSEVEFSHEYWMRHALTLAKRARDEREVPVGAVLVLNNRVIGEGWNRAIGLHDPTAHAEIMALRQGGLVMQNYRLIDATLYVTFEPCVMCAGAMIHSRIGRVVFGVRNAKTGAAGSLMDVLHYPGNIMNFFKTEITLANGEIRKRPLIETNGETGEIVWDKGRDFATVRKVLSMPQVNIVKKTEVQTGGFSKESILPKRNSDKLIARKKDWDPKKYGGFDSPTVAYSVLVVAKVEKGKSKKLKSVKELLGITIMERSSFEKNPIDFLEAKGYKEVKKDLIIKLPKYSLFELENGRKRMLASAGELQKGNELALPSKYVNFLYLASHYEKLKGSPEDNEQKQLFVEQHKHYLDEIIEQISEFSKRVILADANLDKVLSAYNKHRDKPIREQAENIIHLFTLTNLGAPAAFKYFDTTIDRKRYTSTKEVLDATLIHQSITGLYETRIDLSQLGGD

SEQ ID NO: 171 - protein, 1554 aa, Artificial Sequence
  Description of Artificial Sequence: Synthetic polypeptide
MDKKYSIGLAIGTNSVGWAVITDEYKVPSKKFKVLGNTDRHSIKKNLIGALLFDSGETAEATRLKRTARRRYTRRKNRICYLQEIFSNEMAKVDDSFFHRLEESFLVEEDKKHERHPIFGNIVDEVAYHEKYPTIYHLRKKLVDSTDKADLRLIYLALAHMIKFRGHFLIEGDLNPDNSDVDKLFIQLVQTYNQLFEENPINASGVDAKAILSARLSKSRRLENLIAQLPGEKKNGLFGNLIALSLGLTPNFKSNFDLAEDAKLQLSKDTYDDDLDNLLAQIGDQYADLFLAAKNLSDAILLSDILRVNTEITKAPLSASMIKRYDEHHQDLTLLKALVRQQLPEKYKEIFFDQSKNGYAGYIDGGASQEEFYKFIKPILEKMDGTEELLVKLNREDLLRKQRTFDNGSIPHQIHLGELHAILRRQEDFYPFLKDNREKIEKILTFRIPYYVGPLARGNSRFAWMTRKSEETITPWNFEEVVDKGASAQSFIERMTNFDKNLPNEKVLPKHSLLYEYFTVYNELTKVKYVTEGMRKPAFLSGEQKKAIVDLLFKTNRKVTVKQLKEDYFKKIECFDSVEISGVEDRFNASLGTYHDLLKIIKDKDFLDNEENEDILEDIVLTLTLFEDREMIEERLKTYAHLFDDKVMKQLKRRRYTGWGRLSRKLINGIRDKQSGKTILDFLKSDGFANRNFMQLIHDDSLTFKEDIQKAQVSGQGDSLHEHIANLAGSPAIKKGILQTVKVVDELVKVMGRHKPENIVIEMARENQTTQKGQKNSRERMKRIEEGIKELGSQILKEHPVENTQLQNEKLYLYYLQNGRDMYVDQELDINRLSDYDVDHIVPQSFLKDDSIDNKVLTRSDKNRGKSDNVPSEEVVKKMKNYWRQLLNAKLITQRKFDNLTKAERGGLSELDKAGFIKRQLVETRQITKHVAQILDSRMNTKYDENDKLIREVKVITLKSKLVSDFRKDFQFYKVREINNYHHAHDAYLNAVVGTALIKKYPKLESEFVYGDYKVYDVRKMIAKSEQEIGKATAKYFFYSNIMNFFKTEITLANGEIRKRPLIETNGETGEIVWDKGRDFATVRKVLSMPQVNIVKKTEVQTGGFSKESILPKRNSDKLIARKKDWDPKKYGGFDSPTVAYSVLVVAKVEKGKSKKLKSVKELLGITIMERSSFEKNPIDFLEAKGYKEVKKDLIIKLPKYSLFELENGRKRMLASAGELQKGNELALPSKYVNFLYLASHYEKLKGSPEDNEQKQLFVEQHKHYLDEIIEQISEFSKRVILADANLDKVLSAYNKHRMNHRVEITEGILADECAALLCYFFRMPRQVFNAQKKAQSSTDGSSGSETPGTSESATPESSGSEVEFSHEYWMRHALTLAKRARDEREVPVGAVLVLNNRVIGEGWNRAIGLHDPTAHAEIMALRQGGLVMQNYRLIDATLYVTFEPCVMCAGAMIHSRIGRVVFGVRNAKTGAAGSLMDVLHYPGDKPIREQAENIIHLFTLTNLGAPAAFKYFDTTIDRKRYTSTKEVLDATLIHQSITGLYETRIDLSQLGGD

SEQ ID NO: 172 - protein, 1454 aa, Artificial Sequence
  Description of Artificial Sequence: Synthetic polypeptide
MDKKYSIGLAIGTNSVGWAVITDEYKVPSKKFKVLGNTDRHSIKKNLIGALLFDSGETAEATRLKRTARRRYTRRKNRICYLQEIFSNEMAKVDDSFFHRLEESFLVEEDKKHERHPIFGNIVDEVAYHEKYPTIYHLRKKLVDSTDKADLRLIYLALAHMIKFRGHFLIEGDLNPDNSDVDKLFIQLVQTYNQLFEENPINASGVDAKAILSARLSKSRRLENLIAQLPGEKKNGLFGNLIALSLGLTPNFKSNFDLAEDAKLQLSKDTYDDDLDNLLAQIGDQYADLFLAAKNLSDAILLSDILRVNTEITKAPLSASMIKRYDEHHQDLTLLKALVRQQLPEKYKEIFFDQSKNGYAGYIDGGASQEEFYKFIKPILEKMDGTEELLVKLNREDLLRKQRTFDNGSIPHQIHLGELHAILRRQEDFYPFLKDNREKIEKILTFRIPYYVGPLARGNSRFAWMTRKSEETITPWNFEEVVDKGASAQSFIERMTNFDKNLPNEKVLPKHSLLYEYFTVYNELTKVKYVTEGMRKPAFLSGEQKKAIVDLLFKTNRKVTVKQLKEDYFKKIECFDSVEISGVEDRFNASLGTYHDLLKIIKDKDFLDNEENEDILEDIVLTLTLFEDREMIEERLKTYAHLFDDKVMKQLKRRRYTGWGRLSRKLINGIRDKQSGKTILDFLKSDGFANRNFMQLIHDDSLTFKEDIQKAQVSGQGDSLHEHIANLAGSPAIKKGILQTVKVVDELVKVMGRHKPENIVIEMARENQTTQKGQKNSRERMKRIEEGIKELGSEVEFSHEYWMRHALTLAKRARDEREVPVGAVLVLNNRVIGEGWNRAIGLHDPTAHAEIMALRQGGLVMQNYRLIDATLYVTFEPCVMCAGAMIHSRIGRVVFGVRNAKTGAAGSLMDVLHYPGMNHRVEITEGILADECAALLCYFFRMPRQVFNAQKKAQSSTDEEVVKKMKNYWRQLLNAKLITQRKFDNLTKAERGGLSELDKAGFIKRQLVETRQITKHVAQILDSRMNTKYDENDKLIREVKVITLKSKLVSDFRKDFQFYKVREINNYHHAHDAYLNAVVGTALIKKYPKLESEFVYGDYKVYDVRKMIAKSEQEIGKATAKYFFYSNIMNFFKTEITLANGEIRKRPLIETNGETGEIVWDKGRDFATVRKVLSMPQVNIVKKTEVQTGGFSKESILPKRNSDKLIARKKDWDPKKYGGFDSPTVAYSVLVVAKVEKGKSKKLKSVKELLGITIMERSSFEKNPIDFLEAKGYKEVKKDLIIKLPKYSLFELENGRKRMLASAGELQKGNELALPSKYVNFLYLASHYEKLKGSPEDNEQKQLFVEQHKHYLDEIIEQISEFSKRVILADANLDKVLSAYNKHRDKPIREQAENIIHLFTLTNLGAPAAFKYFDTTIDRKRYTSTKEVLDATLIHQSITGLYETRIDLSQLGGD

SEQ ID NO: 173 - protein, 1420 aa, Artificial Sequence
  Description of Artificial Sequence: Synthetic polypeptide
MDKKYSIGLAIGTNSVGWAVITDEYKVPSKKFKVLGNTDRHSIKKNLIGALLFDSGETAEATRLKRTARRRYTRRKNRICYLQEIFSNEMAKVDDSFFHRLEESFLVEEDKKHERHPIFGNIVDEVAYHEKYPTIYHLRKKLVDSTDKADLRLIYLALAHMIKFRGHFLIEGDLNPDNSDVDKLFIQLVQTYNQLFEENPINASGVDAKAILSARLSKSRRLENLIAQLPGEKKNGLFGNLIALSLGLTPNFKSNFDLAEDAKLQLSKDTYDDDLDNLLAQIGDQYADLFLAAKNLSDAILLSDILRVNTEITKAPLSASMIKRYDEHHQDLTLLKALVRQQLPEKYKEIFFDQSKNGYAGYIDGGASQEEFYKFIKPILEKMDGTEELLVKLNREDLLRKQRTFDNGSIPHQIHLGELHAILRRQEDFYPFLKDNREKIEKILTFRIPYYVGPLARGNSRFAWMTRKSEETITPWNFEEVVDKGASAQSFIERMTNFDKNLPNEKVLPKHSLLYEYFTVYNELTKVKYVTEGMRKPAFLSGEQKKAIVDLLFKTNRKVTVKQLKEDYFKKIECFDSVEISGVEDRFNASLGTYHDLLKIIKDKDFLDNEENEDILEDIVLTLTLFEDREMIEERLKTYAHLFDDKVMKQLKRRRYTGWGRLSRKLINGIRDKQSGKTILDFLKSDGFANRNFMQLIHDDSLTFKEDIQKAQVSGQGDSLHEHIANLAGSPAIKKGILQTVKVVDELVKVMGRHKPENIVIEMARENQTTQKGQKNSRERMKRIEEGIKELGSEVEFSHEYWMRHALTLAKRARDEREVPVGAVLVLNNRVIGEGWNRAIGLHDPTAHAEIMALRQGGLVMQNYRLIDATLYVTFEPCVMCAGAMIHSRIGRVVFGVRNAKTGAAGSLMDVLHYPGMNHRVEITEGILADECAALLCYFFRMPRQVFNAQKKAQSSTDGLSELDKAGFIKRQLVETRQITKHVAQILDSRMNTKYDENDKLIREVKVITLKSKLVSDFRKDFQFYKVREINNYHHAHDAYLNAVVGTALIKKYPKLESEFVYGDYKVYDVRKMIAKSEQEIGKATAKYFFYSNIMNFFKTEITLANGEIRKRPLIETNGETGEIVWDKGRDFATVRKVLSMPQVNIVKKTEVQTGGFSKESILPKRNSDKLIARKKDWDPKKYGGFDSPTVAYSVLVVAKVEKGKSKKLKSVKELLGITIMERSSFEKNPIDFLEAKGYKEVKKDLIIKLPKYSLFELENGRKRMLASAGELQKGNELALPSKYVNFLYLASHYEKLKGSPEDNEQKQLFVEQHKHYLDEIIEQISEFSKRVILADANLDKVLSAYNKHRDKPIREQAENIIHLFTLTNLGAPAAFKYFDTTIDRKRYTSTKEVLDATLIHQSITGLYETRIDLSQLGGD

SEQ ID NO: 174 - protein, 1554 aa, Artificial Sequence
  Description of Artificial Sequence: Synthetic polypeptide
MDKKYSIGLAIGTNSVGWAVITDEYKVPSKKFKVLGNTDRHSIKKNLIGALLFDSGETAEATRLKRTARRRYTRRKNRICYLQEIFSNEMAKVDDSFFHRLEESFLVEEDKKHERHPIFGNIVDEVAYHEKYPTIYHLRKKLVDSTDKADLRLIYLALAHMIKFRGHFLIEGDLNPDNSDVDKLFIQLVQTYNQLFEENPINASGVDAKAILSARLSKSRRLENLIAQLPGEKKNGLFGNLIALSLGLTPNFKSNFDLAEDAKLQLSKDTYDDDLDNLLAQIGDQYADLFLAAKNLSDAILLSDILRVNTEITKAPLSASMIKRYDEHHQDLTLLKALVRQQLPEKYKEIFFDQSKNGYAGYIDGGASQEEFYKFIKPILEKMDGTEELLVKLNREDLLRKQRTFDNGSIPHQIHLGELHAILRRQEDFYPFLKDNREKIEKILTFRIPYYVGPLARGNSRFAWMTRKSEETITPWNFEEVVDKGASAQSFIERMTNFDKNLPNEKVLPKHSLLYEYFTVYNELTKVKYVTEGMRKPAFLSGEQKKAIVDLLFKTNRKVTVKQLKEDYFKKIECFDSVEISGVEDRFNASLGTYHDLLKIIKDKDFLDNEENEDILEDIVLTLTLFEDREMIEERLKTYAHLFDDKVMKQLKRRRYTGWGRLSRKLINGIRDKQSGKTILDFLKSDGFANRNFMQLIHDDSLTFKEDIQKAQVSGQGDSLHEHIANLAGSPAIKKGILQTVKVVDELVKVMGRHKPENIVIEMARENQTTQKGQKNSRERMKRIEEGIKELGSQILKEHPVENTQLQNEKLYLYYLQNGRDMYVDQELDINRLSDYDVDHIVPQSFLKDDSIDNKVLTRSDKNRGKSDNVPSEEVVKKMKNYWRQLLNAKLITQRKFDNLTKAERGGLSELDKAGFIKRQLVETRQITKHVAQILDSRMNTKYDENDKLIREVKVITLKSKLVSDFRKDFQFYKVREINNYHHAHDAYLNAVVGTALIKKYPKTAHAEIMALRQGGLVMQNYRLIDATLYVTFEPCVMCAGAMIHSRIGRVVFGVRNAKTGAAGSLMDVLHYPGMNHRVEITEGILADECAALLCYFFRMPRQVFNAQKKAQSSTDGSSGSETPGTSESATPESSGSEVEFSHEYWMRHALTLAKRARDEREVPVGAVLVLNNRVIGEGWNRAIGLHDPLESEFVYGDYKVYDVRKMIAKSEQEIGKATAKYFFYSNIMNFFKTEITLANGEIRKRPLIETNGETGEIVWDKGRDFATVRKVLSMPQVNIVKKTEVQTGGFSKESILPKRNSDKLIARKKDWDPKKYGGFDSPTVAYSVLVVAKVEKGKSKKLKSVKELLGITIMERSSFEKNPIDFLEAKGYKEVKKDLIIKLPKYSLFELENGRKRMLASAGELQKGNELALPSKYVNFLYLASHYEKLKGSPEDNEQKQLFVEQHKHYLDEIIEQISEFSKRVILADANLDKVLSAYNKHRDKPIREQAENIIHLFTLTNLGAPAAFKYFDTTIDRKRYTSTKEVLDATLIHQSITGLYETRIDLSQLGGD

SEQ ID NO: 175 - protein, 1554 aa, Artificial Sequence
  Description of Artificial Sequence: Synthetic polypeptide
MDKKYSIGLAIGTNSVGWAVITDEYKVPSKKFKVLGNTDRHSIKKNLIGALLFDSGETAEATRLKRTARRRYTRRKNRICYLQEIFSNEMAKVDDSFFHRLEESFLVEEDKKHERHPIFGNIVDEVAYHEKYPTIYHLRKKLVDSTDKADLRLIYLALAHMIKFRGHFLIEGDLNPDNSDVDKLFIQLVQTYNQLFEENPINASGVDAKAILSARLSKSRRLENLIAQLPGEKKNGLFGNLIALSLGLTPNFKSNFDLAEDAKLQLSKDTYDDDLDNLLAQIGDQYADLFLAAKNLSDAILLSDILRVNTEITKAPLSASMIKRYDEHHQDLTLLKALVRQQLPEKYKEIFFDQSKNGYAGYIDGGASQEEFYKFIKPILEKMDGTEELLVKLNREDLLRKQRTFDNGSIPHQIHLGELHAILRRQEDFYPFLKDNREKIEKILTFRIPYYVGPLARGNSRFAWMTRKSEETITPWNFEEVVDKGASAQSFIERMTNFDKNLPNEKVLPKHSLLYEYFTVYNELTKVKYVTEGMRKPAFLSGEQKKAIVDLLFKTNRKVTVKQLKEDYFKKIECFDSVEISGVEDRFNASLGTYHDLLKIIKDKDFLDNEENEDILEDIVLTLTLFEDREMIEERLKTYAHLFDDKVMKQLKRRRYTGWGRLSRKLINGIRDKQSGKTILDFLKSDGFANRNFMQLIHDDSLTFKEDIQKAQVSGQGDSLHEHIANLAGSPAIKKGILQTVKVVDELVKVMGRHKPENIVIEMARENQTTQKGQKNSRERMKRIEEGIKELGSQILKEHPVENTQLQNEKLYLYYLQNGRDMYVDQELDINRLSDYDVDHIVPQSFLKDDSIDNKVLTRSDKNRGKSDNVPSEEVVKKMKNYWRQLLNAKLITQRKFDNLTKAERGGLSELDKAGFIKRQLVETRQITKHVAQILDSRMNTKYDENDKLIREVKVITLKSKLVSDFRKDFQFYKVREINNYHHAHDAYLNAVVGTALIKKYPKLESEFVYGDYKVTAHAEIMALRQGGLVMQNYRLIDATLYVTFEPCVMCAGAMIHSRIGRVVFGVRNAKTGAAGSLMDVLHYPGMNHRVEITEGILADECAALLCYFFRMPRQVFNAQKKAQSSTDGSSGSETPGTSESATPESSGSEVEFSHEYWMRHALTLAKRARDEREVPVGAVLVLNNRVIGEGWNRAIGLHDPYDVRKMIAKSEQEIGKATAKYFFYSNIMNFFKTEITLANGEIRKRPLIETNGETGEIVWDKGRDFATVRKVLSMPQVNIVKKTEVQTGGFSKESILPKRNSDKLIARKKDWDPKKYGGFDSPTVAYSVLVVAKVEKGKSKKLKSVKELLGITIMERSSFEKNPIDFLEAKGYKEVKKDLIIKLPKYSLFELENGRKRMLASAGELQKGNELALPSKYVNFLYLASHYEKLKGSPEDNEQKQLFVEQHKHYLDEIIEQISEFSKRVILADANLDKVLSAYNKHRDKPIREQAENIIHLFTLTNLGAPAAFKYFDTTIDRKRYTSTKEVLDATLIHQSITGLYETRIDLSQLGGD

SEQ ID NO: 176 - protein, 1554 aa, Artificial Sequence
  Description of Artificial Sequence: Synthetic polypeptide
MDKKYSIGLAIGTNSVGWAVITDEYKVPSKKFKVLGNTDRHSIKKNLIGALLFDSGETAEATRLKRTARRRYTRRKNRICYLQEIFSNEMAKVDDSFFHRLEESFLVEEDKKHERHPIFGNIVDEVAYHEKYPTIYHLRKKLVDSTDKADLRLIYLALAHMIKFRGHFLIEGDLNPDNSDVDKLFIQLVQTYNQLFEENPINASGVDAKAILSARLSKSRRLENLIAQLPGEKKNGLFGNLIALSLGLTPNFKSNFDLAEDAKLQLSKDTYDDDLDNLLAQIGDQYADLFLAAKNLSDAILLSDILRVNTEITKAPLSASMIKRYDEHHQDLTLLKALVRQQLPEKYKEIFFDQSKNGYAGYIDGGASQEEFYKFIKPILEKMDGTEELLVKLNREDLLRKQRTFDNGSIPHQIHLGELHAILRRQEDFYPFLKDNREKIEKILTFRIPYYVGPLARGNSRFAWMTRKSEETITPWNFEEVVDKGASAQSFIERMTNFDKNLPNEKVLPKHSLLYEYFTVYNELTKVKYVTEGMRKPAFLSGEQKKAIVDLLFKTNRKVTVKQLKEDYFKKIECFDSVEISGVEDRFNASLGTYHDLLKIIKDKDFLDNEENEDILEDIVLTLTLFEDREMIEERLKTYAHLFDDKVMKQLKRRRYTGWGRLSRKLINGIRDKQSGKTILDFLKSDGFANRNFMQLIHDDSLTFKEDIQKAQVSGQGDSLHEHIANLAGSPAIKKGILQTVKVVDELVKVMGRHKPENIVIEMARENQTTQKGQKNSRERMKRIEEGIKELGSQILKEHPVENTQLQNEKLYLYYLQNGRDMYVDQELDINRLSDYDVDHIVPQSFLKDDSIDNKVLTRSDKNRGKSDNVPSEEVVKKMKNYWRQLLNAKLITQRKFDNLTKAERGGLSELDKAGFIKRQLVETRQITKHVAQILDSRMNTKYDENDKLIREVKVITLKSKLVSDFRKDFQFYKVREINNYHHAHDAYLNAVVGTALIKKYPKLESEFVYGDYKVYDVRKMITAHAEIMALRQGGLVMQNYRLIDATLYVTFEPCVMCAGAMIHSRIGRVVFGVRNAKTGAAGSLMDVLHYPGMNHRVEITEGILADECAALLCYFFRMPRQVFNAQKKAQSSTDGSSGSETPGTSESATPESSGSEVEFSHEYWMRHALTLAKRARDEREVPVGAVLVLNNRVIGEGWNRAIGLHDPAKSEQEIGKATAKYFFYSNIMNFFKTEITLANGEIRKRPLIETNGETGEIVWDKGRDFATVRKVLSMPQVNIVKKTEVQTGGFSKESILPKRNSDKLIARKKDWDPKKYGGFDSPTVAYSVLVVAKVEKGKSKKLKSVKELLGITIMERSSFEKNPIDFLEAKGYKEVKKDLIIKLPKYSLFELENGRKRMLASAGELQKGNELALPSKYVNFLYLASHYEKLKGSPEDNEQKQLFVEQHKHYLDEIIEQISEFSKRVILADANLDKVLSAYNKHRDKPIREQAENIIHLFTLTNLGAPAAFKYFDTTIDRKRYTSTKEVLDATLIHQSITGLYETRIDLSQLGGD

SEQ ID NO: 177 - protein, 1554 aa, Artificial Sequence
  Description of Artificial Sequence: Synthetic polypeptide
MDKKYSIGLAIGTNSVGWAVITDEYKVPSKKFKVLGNTDRHSIKKNLIGALLFDSGETAEATRLKRTARRRYTRRKNRICYLQEIFSNEMAKVDDSFFHRLEESFLVEEDKKHERHPIFGNIVDEVAYHEKYPTIYHLRKKLVDSTDKADLRLIYLALAHMIKFRGHFLIEGDLNPDNSDVDKLFIQLVQTYNQLFEENPINASGVDAKAILSARLSKSRRLENLIAQLPGEKKNGLFGNLIALSLGLTPNFKSNFDLAEDAKLQLSKDTYDDDLDNLLAQIGDQYADLFLAAKNLSDAILLSDILRVNTEITKAPLSASMIKRYDEHHQDLTLLKALVRQQLPEKYKEIFFDQSKNGYAGYIDGGASQEEFYKFIKPILEKMDGTEELLVKLNREDLLRKQRTFDNGSIPHQIHLGELHAILRRQEDFYPFLKDNREKIEKILTFRIPYYVGPLARGNSRFAWMTRKSEETITPWNFEEVVDKGASAQSFIERMTNFDKNLPNEKVLPKHSLLYEYFTVYNELTKVKYVTEGMRKPAFLSGEQKKAIVDLLFKTNRKVTVKQLKEDYFKKIECFDSVEISGVEDRFNASLGTYHDLLKIIKDKDFLDNEENEDILEDIVLTLTLFEDREMIEERLKTYAHLFDDKVMKQLKRRRYTGWGRLSRKLINGIRDKQSGKTILDFLKSDGFANRNFMQLIHDDSLTFKEDIQKAQVSGQGDSLHEHIANLAGSPAIKKGILQTVKVVDELVKVMGRHKPENIVIEMARENQTTQKGQKNSRERMKRIEEGIKELGSQILKEHPVENTQLQNEKLYLYYLQNGRDMYVDQELDINRLSDYDVDHIVPQSFLKDDSIDNKVLTRSDKNRGKSDNVPSEEVVKKMKNYWRQLLNAKLITQRKFDNLTKAERGGLSELDKAGFIKRQLVETRQITKHVAQILDSRMNTKYDENDKLIREVKVITLKSKLVSDFRKDFQFYKVREINNYHHAHDAYLNAVVGTALIKKYPKLESEFVYGDYKVYDVRKMIAKSEQEITAHAEIMALRQGGLVMQNYRLIDATLYVTFEPCVMCAGAMIHSRIGRVVFGVRNAKTGAAGSLMDVLHYPGMNHRVEITEGILADECAALLCYFFRMPRQVFNAQKKAQSSTDGSSGSETPGTSESATPESSGSEVEFSHEYWMRHALTLAKRARDEREVPVGAVLVLNNRVIGEGWNRAIGLHDPGKATAKYFFYSNIMNFFKTEITLANGEIRKRPLIETNGETGEIVWDKGRDFATVRKVLSMPQVNIVKKTEVQTGGFSKESILPKRNSDKLIARKKDWDPKKYGGFDSPTVAYSVLVVAKVEKGKSKKLKSVKELLGITIMERSSFEKNPIDFLEAKGYKEVKKDLIIKLPKYSLFELENGRKRMLASAGELQKGNELALPSKYVNFLYLASHYEKLKGSPEDNEQKQLFVEQHKHYLDEIIEQISEFSKRVILADANLDKVLSAYNKHRDKPIREQAENIIHLFTLTNLGAPAAFKYFDTTIDRKRYTSTKEVLDATLIHQSITGLYETRIDLSQLGGD

SEQ ID NO: 178 - protein, 1554 aa, Artificial Sequence
  Description of Artificial Sequence: Synthetic polypeptide
MDKKYSIGLAIGTNSVGWAVITDEYKVPSKKFKVLGNTDRHSIKKNLIGALLFDSGETAEATRLKRTARRRYTRRKNRICYLQEIFSNEMAKVDDSFFHRLEESFLVEEDKKHERHPIFGNIVDEVAYHEKYPTIYHLRKKLVDSTDKADLRLIYLALAHMIKFRGHFLIEGDLNPDNSDVDKLFIQLVQTYNQLFEENPINASGVDAKAILSARLSKSRRLENLIAQLPGEKKNGLFGNLIALSLGLTPNFKSNFDLAEDAKLQLSKDTYDDDLDNLLAQIGDQYADLFLAAKNLSDAILLSDILRVNTEITKAPLSASMIKRYDEHHQDLTLLKALVRQQLPEKYKEIFFDQSKNGYAGYIDGGASQEEFYKFIKPILEKMDGTEELLVKLNREDLLRKQRTFDNGSIPHQIHLGELHAILRRQEDFYPFLKDNREKIEKILTFRIPYYVGPLARGNSRFAWMTRKSEETITPWNFEEVVDKGASAQSFIERMTNFDKNLPNEKVLPKHSLLYEYFTVYNELTKVKYVTEGMRKPAFLSGEQKKAIVDLLFKTNRKVTVKQLKEDYFKKIECFDSVEISGVEDRFNASLGTYHDLLKIIKDKDFLDNEENEDILEDIVLTLTLFEDREMIEERLKTYAHLFDDKVMKQLKRRRYTGWGRLSRKLINGIRDKQSGKTILDFLKSDGFANRNFMQLIHDDSLTFKEDIQKAQVSGQGDSLHEHIANLAGSPAIKKGILQTVKVVDELVKVMGRHKPENIVIEMARENQTTQKGQKNSRERMKRIEEGIKELGSQILKEHPVENTQLQNEKLYLYYLQNGRDMYVDQELDINRLSDYDVDHIVPQSFLKDDSIDNKVLTRSDKNRGKSDNVPSEEVVKKMKNYWRQLLNAKLITQRKFDNLTKAERGGLSELDKAGFIKRQLVETRQITKHVAQILDSRMNTKYDENDKLIREVKVITLKSKLVSDFRKDFQFYKVREINNYHHAHDAYLNAVVGTALIKKYPKLESEFVYGDYKVYDVRKMIAKSEQEIGKATAKYFFYSTAHAEIMALRQGGLVMQNYRLIDATLYVTFEPCVMCAGAMIHSRIGRVVFGVRNAKTGAAGSLMDVLHYPGMNHRVEITEGILADECAALLCYFFRMPRQVFNAQKKAQSSTDGSSGSETPGTSESATPESSGSEVEFSHEYWMRHALTLAKRARDEREVPVGAVLVLNNRVIGEGWNRAIGLHDPNIMNFFKTEITLANGEIRKRPLIETNGETGEIVWDKGRDFATVRKVLSMPQVNIVKKTEVQTGGFSKESILPKRNSDKLIARKKDWDPKKYGGFDSPTVAYSVLVVAKVEKGKSKKLKSVKELLGITIMERSSFEKNPIDFLEAKGYKEVKKDLIIKLPKYSLFELENGRKRMLASAGELQKGNELALPSKYVNFLYLASHYEKLKGSPEDNEQKQLFVEQHKHYLDEIIEQISEFSKRVILADANLDKVLSAYNKHRDKPIREQAENIIHLFTLTNLGAPAAFKYFDTTIDRKRYTSTKEVLDATLIHQSITGLYETRIDLSQLGGD

SEQ ID NO: 179 - protein, 1554 aa, Artificial Sequence
  Description of Artificial Sequence: Synthetic polypeptide
MDKKYSIGLAIGTNSVGWAVITDEYKVPSKKFKVLGNTDRHSIKKNLIGALLFDSGETAEATRLKRTARRRYTRRKNRICYLQEIFSNEMAKVDDSFFHRLEESFLVEEDKKHERHPIFGNIVDEVAYHEKYPTIYHLRKKLVDSTDKADLRLIYLALAHMIKFRGHFLIEGDLNPDNSDVDKLFIQLVQTYNQLFEENPINASGVDAKAILSARLSKSRRLENLIAQLPGEKKNGLFGNLIALSLGLTPNFKSNFDLAEDAKLQLSKDTYDDDLDNLLAQIGDQYADLFLAAKNLSDAILLSDILRVNTEITKAPLSASMIKRYDEHHQDLTLLKALVRQQLPEKYKEIFFDQSKNGYAGYIDGGASQEEFYKFIKPILEKMDGTEELLVKLNREDLLRKQRTFDNGSIPHQIHLGELHAILRRQEDFYPFLKDNREKIEKILTFRIPYYVGPLARGNSRFAWMTRKSEETITPWNFEEVVDKGASAQSFIERMTNFDKNLPNEKVLPKHSLLYEYFTVYNELTKVKYVTEGMRKPAFLSGEQKKAIVDLLFKTNRKVTVKQLKEDYFKKIECFDSVEISGVEDRFNASLGTYHDLLKIIKDKDFLDNEENEDILEDIVLTLTLFEDREMIEERLKTYAHLFDDKVMKQLKRRRYTGWGRLSRKLINGIRDKQSGKTILDFLKSDGFANRNFMQLIHDDSLTFKEDIQKAQVSGQGDSLHEHIANLAGSPAIKKGILQTVKVVDELVKVMGRHKPENIVIEMARENQTTQKGQKNSRERMKRIEEGIKELGSQILKEHPVENTQLQNEKLYLYYLQNGRDMYVDQELDINRLSDYDVDHIVPQSFLKDDSIDNKVLTRSDKNRGKSDNVPSEEVVKKMKNYWRQLLNAKLITQRKFDNLTKAERGGLSELDKAGFIKRQLVETRQITKHVAQILDSRMNTKYDENDKLIREVKVITLKSKLVSDFRKDFQFYKVREINNYHHAHDAYLNAVVGTALIKKYPKLESEFVYGDYKVYDVRKMIAKSEQEIGKATAKYFFYSNIMNFFKTEITLANTAHAEIMALRQGGLVMQNYRLIDATLYVTFEPCVMCAGAMIHSRIGRVVFGVRNAKTGAAGSLMDVLHYPGMNHRVEITEGILADECAALLCYFFRMPRQVFNAQKKAQSSTDGSSGSETPGTSESATPESSGSEVEFSHEYWMRHALTLAKRARDEREVPVGAVLVLNNRVIGEGWNRAIGLHDPGEIRKRPLIETNGETGEIVWDKGRDFATVRKVLSMPQVNIVKKTEVQTGGFSKESILPKRNSDKLIARKKDWDPKKYGGFDSPTVAYSVLVVAKVEKGKSKKLKSVKELLGITIMERSSFEKNPIDFLEAKGYKEVKKDLIIKLPKYSLFELENGRKRMLASAGELQKGNELALPSKYVNFLYLASHYEKLKGSPEDNEQKQLFVEQHKHYLDEIIEQISEFSKRVILADANLDKVLSAYNKHRDKPIREQAENIIHLFTLTNLGAPAAFKYFDTTIDRKRYTSTKEVLDATLIHQSITGLYETRIDLSQLGGD

SEQ ID NO: 180 - protein, 1554 aa, Artificial Sequence
  Description of Artificial Sequence: Synthetic polypeptide
MDKKYSIGLAIGTNSVGWAVITDEYKVPSKKFKVLGNTDRHSIKKNLIGALLFDSGETAEATRLKRTARRRYTRRKNRICYLQEIFSNEMAKVDDSFFHRLEESFLVEEDKKHERHPIFGNIVDEVAYHEKYPTIYHLRKKLVDSTDKADLRLIYLALAHMIKFRGHFLIEGDLNPDNSDVDKLFIQLVQTYNQLFEENPINASGVDAKAILSARLSKSRRLENLIAQLPGEKKNGLFGNLIALSLGLTPNFKSNFDLAEDAKLQLSKDTYDDDLDNLLAQIGDQYADLFLAAKNLSDAILLSDILRVNTEITKAPLSASMIKRYDEHHQDLTLLKALVRQQLPEKYKEIFFDQSKNGYAGYIDGGASQEEFYKFIKPILEKMDGTEELLVKLNREDLLRKQRTFDNGSIPHQIHLGELHAILRRQEDFYPFLKDNREKIEKILTFRIPYYVGPLARGNSRFAWMTRKSEETITPWNFEEVVDKGASAQSFIERMTNFDKNLPNEKVLPKHSLLYEYFTVYNELTKVKYVTEGMRKPAFLSGEQKKAIVDLLFKTNRKVTVKQLKEDYFKKIECFDSVEISGVEDRFNASLGTYHDLLKIIKDKDFLDNEENEDILEDIVLTLTLFEDREMIEERLKTYAHLFDDKVMKQLKRRRYTGWGRLSRKLINGIRDKQSGKTILDFLKSDGFANRNFMQLIHDDSLTFKEDIQKAQVSGQGDSLHEHIANLAGSPAIKKGILQTVKVVDELVKVMGRHKPENIVIEMARENQTTQKGQKNSRERMKRIEEGIKELGSQILKEHPVENTQLQNEKLYLYYLQNGRDMYVDQELDINRLSDYDVDHIVPQSFLKDDSIDNKVLTRSDKNRGKSDNVPSEEVVKKMKNYWRQLLNAKLITQRKFDNLTKAERGGLSELDKAGFIKRQLVETRQITKHVAQILDSRMNTKYDENDKLIREVKVITLKSKLVSDFRKDFQFYKVREINNYHHAHDAYLNAVVGTALIKKYPKLESEFVYGDYKVYDVRKMIAKSEQEIGKATAKYFFYSNIMNFFKTEITLANGEIRKRPLIETNGETGEIVWDKGRDFATVRKVLSMPQVNIVKKTEVQTGGFSKESILPKRNSDKLIARKKDWDPKKYGGFDSPTVAYSVLVVAKVEKGKSKKLKSVKELLGITIMERSSFEKNPIDFLEAKGYKEVKKDLIIKLPKYSLFELENGRKRMLASAGELQKGNELALPSKYVNFLYLASHYEKLKGTAHAEIMALRQGGLVMQNYRLIDATLYVTFEPCVMCAGAMIHSRIGRVVFGVRNAKTGAAGSLMDVLHYPGMNHRVEITEGILADECAALLCYFFRMPRQVFNAQKKAQSSTDGSSGSETPGTSESATPESSGSEVEFSHEYWMRHALTLAKRARDEREVPVGAVLVLNNRVIGEGWNRAIGLHDPSPEDNEQKQLFVEQHKHYLDEIIEQISEFSKRVILADANLDKVLSAYNKHRDKPIREQAENIIHLFTLTNLGAPAAFKYFDTTIDRKRYTSTKEVLDATLIHQSITGLYETRIDLSQLGGD

SEQ ID NO: 181 - protein, 178 aa, Escherichia coli
MRRAFITGVFFLSEVEFSHEYWMRHALTLAKRAWDEREVPVGAVLVHNNRVIGEGWNRPIGRHDPTAHAEIMALRQGGLVMQNYRLIDATLYVTLEPCVMCAGAMIHSRIGRVVFGARDAKTGAAGSLMDVLHHPGMNHRVEITEGILADECAALLSDFFRMRRQEIKAQKKAQSSTD

SEQ ID NO: 182 - protein, 167 aa, Escherichia coli; identical to SEQ ID NO: 1

SEQ ID NO: 183 - protein, 8 aa, Artificial Sequence
  Description of Artificial Sequence: Synthetic peptide
SGGSSGGS

SEQ ID NO: 184 - protein, 1609 aa, Artificial Sequence
  Description of Artificial Sequence: Synthetic polypeptide
MSEVEFSHEYWMRHALTLAKRARDEREVPVGAVLVLNNRVIGEGWNRAIGLHDPTAHAEIMALRQGGLVMQNYRLIDATLYVTFEPCVMCAGAMIHSRIGRVVFGVRNAKTGAAGSLMDVLHYPGMNHRVEITEGILADECAALLCTFFRMPRQVFNAQKKAQSSTDSGGSSGGSSGSETPGTSESATPESSGGSSGGSEIGKATAKYFFYSNIMNFFKTEITLANGEIRKRPLIETNGETGEIVWDKGRDFATVRKVLSMPQVNIVKKTEVQTGGFSKESILPKRNSDKLIARKKDWDPKKYGGFMQPTVAYSVLVVAKVEKGKSKKLKSVKELLGITIMERSSFEKNPIDFLEAKGYKEVKKDLIIKLPKYSLFELENGRKRMLASAKFLQKGNELALPSKYVNFLYLASHYEKLKGSPEDNEQKQLFVEQHKHYLDEIIEQISEFSKRVILADANLDKVLSAYNKHRDKPIREQAENIIHLFTLTNLGAPRAFKYFDTTIARKEYRSTKEVLDATLIHQSITGLYETRIDLSQLGGDGGSGGSGGSGGSGGSGGSGGMDKKYSIGLAIGTNSVGWAVITDEYKVPSKKFKVLGNTDRHSIKKNLIGALLFDSGETAEATRLKRTARRRYTRRKNRICYLQEIFSNEMAKVDDSFFHRLEESFLVEEDKKHERHPIFGNIVDEVAYHEKYPTIYHLRKKLVDSTDKADLRLIYLALAHMIKFRGHFLIEGDLNPDNSDVDKLFIQLVQTYNQLFEENPINASGVDAKAILSARLSKSRRLENLIAQLPGEKKNGLFGNLIALSLGLTPNFKSNFDLAEDAKLQLSKDTYDDDLDNLLAQIGDQYADLFLAAKNLSDAILLSDILRVNTEITKAPLSASMIKRYDEHHQDLTLLKALVRQQLPEKYKEIFFDQSKNGYAGYIDGGASQEEFYKFIKPILEKMDGTEELLVKLNREDLLRKQRTFDNGSIPHQIHLGELHAILRRQEDFYPFLKDNREKIEKILTFRIPYYVGPLARGNSRFAWMTRKSEETITPWNFEEVVDKGASAQSFIERMTNFDKNLPNEKVLPKHSLLYEYFTVYNELTKVKYVTEGMRKPAFLSGEQKKAIVDLLFKTNRKVTVKQLKEDYFKKIECFDSVEISGVEDRFNASLGTYHDLLKIIKDKDFLDNEENEDILEDIVLTLTLFEDREMIEERLKTYAHLFDDKVMKQLKRRRYTGWGRLSRKLINGIRDKQSGKTILDFLKSDGFANRNFMQLIHDDSLTFKEDIQKAQVSGQGDSLHEHIANLAGSPAIKKGILQTVKVVDELVKVMGRHKPENIVIEMARENQTTQKGQKNSRERMKRIEEGIKELGSQILKEHPVENTQLQNEKLYLYYLQNGRDMYVDQELDINRLSDYDVDHIVPQSFLKDDSIDNKVLTRSDKNRGKSDNVPSEEVVKKMKNYWRQLLNAKLITQRKFDNLTKAERGGLSELDKAGFIKRQLVETRQITKHVAQILDSRMNTKYDENDKLIREVKVITLKSKLVSDFRKDFQFYKVREINNYHHAHDAYLNAVVGTALIKKYPKLESEFVYGDYKVYDVRKMIAKSEQEGADKRTADGSEFESPKKKRKV

SEQ ID NO: 185 - protein, 1807 aa, Artificial Sequence
  Description of Artificial Sequence: Synthetic polypeptide
MSEVEFSHEYWMRHALTLAKRAWDEREVPVGAVLVHNNRVIGEGWNRPIGRHDPTAHAEIMALRQGGLVMQNYRLIDATLYVTLEPCVMCAGAMIHSRIGRVVFGARDAKTGAAGSLMDVLHHPGMNHRVEITEGILADECAALLSDFFRMRRQEIKAQKKAQSSTDGGSSGGSSGSETPGTSESATPESSGGSSGGSMSEVEFSHEYWMRHALTLAKRARDEREVPVGAVLVLNNRVIGEGWNRAIGLHDPTAHAEIMALRQGGLVMQNYRLIDATLYVTFEPCVMCAGAMIHSRIGRVVFGVRNAKTGAAGSLMDVLHYPGMNHRVEITEGILADECAALLCTFFRMPRQVFNAQKKAQSSTDSGGSSGGSSGSETPGTSESATPESSGGSSGGSEIGKATAKYFFYSNIMNFFKTEITLANGEIRKRPLIETNGETGEIVWDKGRDFATVRKVLSMPQVNIVKKTEVQTGGFSKESILPKRNSDKLIARKKDWDPKKYGGFMQPTVAYSVLVVAKVEKGKSKKLKSVKELLGITIMERSSFEKNPIDFLEAKGYKEVKKDLIIKLPKYSLFELENGRKRMLASAKFLQKGNELALPSKYVNFLYLASHYEKLKGSPEDNEQKQLFVEQHKHYLDEIIEQISEFSKRVILADANLDKVLSAYNKHRDKPIREQAENIIHLFTLTNLGAPRAFKYFDTTIARKEYRSTKEVLDATLIHQSITGLYETRIDLSQLGGDGGSGGSGGSGGSGGSGGSGGMDKKYSIGLAIGTNSVGWAVITDEYKVPSKKFKVLGNTDRHSIKKNLIGALLFDSGETAEATRLKRTARRRYTRRKNRICYLQEIFSNEMAKVDDSFFHRLEESFLVEEDKKHERHPIFGNIVDEVAYHEKYPTIYHLRKKLVDSTDKADLRLIYLALAHMIKFRGHFLIEGDLNPDNSDVDKLFIQLVQTYNQLFEENPINASGVDAKAILSARLSKSRRLENLIAQLPGEKKNGLFGNLIALSLGLTPNFKSNFDLAEDAKLQLSKDTYDDDLDNLLAQIGDQYADLFLAAKNLSDAILLSDILRVNTEITKAPLSASMIKRYDEHHQDLTLLKALVRQQLPEKYKEIFFDQSKNGYAGYIDGGASQEEFYKFIKPILEKMDGTEELLVKLNREDLLRKQRTFDNGSIPHQIHLGELHAILRRQEDFYPFLKDNREKIEKILTFRIPYYVGPLARGNSRFAWMTRKSEETITPWNFEEVVDKGASAQSFIERMTNFDKNLPNEKVLPKHSLLYEYFTVYNELTKVKYVTEGMRKPAFLSGEQKKAIVDLLFKTNRKVTVKQLKEDYFKKIECFDSVEISGVEDRFNASLGTYHDLLKIIKDKDFLDNEENEDILEDIVLTLTLFEDREMIEERLKTYAHLFDDKVMKQLKRRRYTGWGRLSRKLINGIRDKQSGKTILDFLKSDGFANRNFMQLIHDDSLTFKEDIQKAQVSGQGDSLHEHIANLAGSPAIKKGILQTVKVVDELVKVMGRHKPENIVIEMARENQTTQKGQKNSRERMKRIEEGIKELGSQILKEHPVENTQLQNEKLYLYYLQNGRDMYVDQELDINRLSDYDVDHIVPQSFLKDDSIDNKVLTRSDKNRGKSDNVPSEEVVKKMKNYWRQLLNAKLITQRKFDNLTKAERGGLSELDKAGFIKRQLVETRQITKHVAQILDSRMNTKYDENDKLIREVKVITLKSKLVSDFRKDFQFYKVREINNYHHAHDAYLNAVVGTALIKKYPKLESEFVYGDYKVYDVRKMIAKSEQEGADKRTADGSEFESPKKKRKV

SEQ ID NO: 186 - protein, 1588 aa, Artificial Sequence
  Description of Artificial Sequence: Synthetic polypeptide
MSEVEFSHEYWMRHALTLAKRARDEREVPVGAVLVLNNRVIGEGWNRAIGLHDPTAHAEIMALRQGGLVMQNYRLIDATLYVTFEPCVMCAGAMIHSRIGRVVFGVRNAKTGAAGSLMDVLHHPGMNHRVEITEGILADECAALLCRFFRMPRRVFNAQKKAQSSTDSGGSSGGSSGSETPGTSESATPESSGGSSGGSDKKYSIGLAIGTNSVGWAVITDEYKVPSKKFKVLGNTDRHSIKKNLIGALLFDSGETAEATRLKRTARRRYTRRKNRICYLQEIFSNEMAKVDDSFFHRLEESFLVEEDKKHERHPIFGNIVDEVAYHEKYPTIYHLRKKLVDSTDKADLRLIYLALAHMIKFRGHFLIEGDLNPDNSDVDKLFIQLVQTYNQLFEENPINASGVDAKAILSARLSKSRRLENLIAQLPGEKKNGLFGNLIALSLGLTPNFKSNFDLAEDAKLQLSKDTYDDDLDNLLAQIGDQYADLFLAAKNLSDAILLSDILRVNTEITKAPLSASMIKRYDEHHQDLTLLKALVRQQLPEKYKEIFFDQSKNGYAGYIDGGASQEEFYKFIKPILEKMDGTEELLVKLNREDLLRKQRTFDNGSIPHQIHLGELHAILRRQEDFYPFLKDNREKIEKILTFRIPYYVGPLARGNSRFAWMTRKSEETITPWNFEEVVDKGASAQSFIERMTNFDKNLPNEKVLPKHSLLYEYFTVYNELTKVKYVTEGMRKPAFLSGEQKKAIVDLLFKTNRKVTVKQLKEDYFKKIECFDSVEISGVEDRFNASLGTYHDLLKIIKDKDFLDNEENEDILEDIVLTLTLFEDREMIEERLKTYAHLFDDKVMKQLKRRRYTGWGRLSRKLINGIRDKQSGKTILDFLKSDGFANRNFMQLIHDDSLTFKEDIQKAQVSGQGDSLHEHIANLAGSPAIKKGILQTVKVVDELVKVMGRHKPENIVIEMARENQTTQKGQKNSRERMKRIEEGIKELGSQILKEHPVENTQLQNEKLYLYYLQNGRDMYVDQELDINRLSDYDVDHIVPQSFLKDDSIDNKVLTRSDKNRGKSDNVPSEEVVKKMKNYWRQLLNAKLITQRKFDNLTKAERGGLSELDKAGFIKRQLVETRQITKHVAQILDSRMNTKYDENDKLIREVKVITLKSKLVSDFRKDFQFYKVREINNYHHAHDAYLNAVVGTALIKKYPKLESEFVYGDYKVYDVRKMIAKSEQEIGKATAKYFFYSNIMNFFKTEITLANGEIRKRPLIETNGETGEIVWDKGRDFATVRKVLSMPQVNIVKKTEVQTGGFSKESILPKRNSDKLIARKKDWDPKKYGGFDSPTVAYSVLVVAKVEKGKSKKLKSVKELLGITIMERSSFEKNPIDFLEAKGYKEVKKDLIIKLPKYSLFELENGRKRMLASAGELQKGNELALPSKYVNFLYLASHYEKLKGSPEDNEQKQLFVEQHKHYLDEIIEQISEFSKRVILADANLDKVLSAYNKHRDKPIREQAENIIHLFTLTNLGAPAAFKYFDTTIDRKRYTSTKEVLDATLIHQSITGLYETRIDLSQLGGDEGADKRTADGSEFESPKKKRKV

SEQ ID NO: 187 - protein, 1786 aa, Artificial Sequence
  Description of Artificial Sequence: Synthetic polypeptide
MSEVEFSHEYWMRHALTLAKRAWDEREVPVGAVLVHNNRVIGEGWNRPIGRHDPTAHAEIMALRQGGLVMQNYRLIDATLYVTLEPCVMCAGAMIHSRIGRVVFGARDAKTGAAGSLMDVLHHPGMNHRVEITEGILADECAALLSDFFRMRRQEIKAQKKAQSSTDSGGSSGGSSGSETPGTSESATPESSGGSSGGSSEVEFSHEYWMRHALTLAKRARDEREVPVGAVLVLNNRVIGEGWNRAIGLHDPTAHAEIMALRQGGLVMQNYRLIDATLYVTFEPCVMCAGAMIHSRIGRVVFGVRNAKTGAAGSLMDVLHHPGMNHRVEITEGILADECAALLCRFFRMPRRVFNAQKKAQSSTDSGGSSGGSSGSETPGTSESATPESSGGSSGGSDKKYSIGLAIGTNSVGWAVITDEYKVPSKKFKVLGNTDRHSIKKNLIGALLFDSGETAEATRLKRTARRRYTRRKNRICYLQEIFSNEMAKVDDSFFHRLEESFLVEEDKKHERHPIFGNIVDEVAYHEKYPTIYHLRKKLVDSTDKADLRLIYLALAHMIKFRGHFLIEGDLNPDNSDVDKLFIQLVQTYNQLFEENPINASGVDAKAILSARLSKSRRLENLIAQLPGEKKNGLFGNLIALSLGLTPNFKSNFDLAEDAKLQLSKDTYDDDLDNLLAQIGDQYADLFLAAKNLSDAILLSDILRVNTEITKAPLSASMIKRYDEHHQDLTLLKALVRQQLPEKYKEIFFDQSKNGYAGYIDGGASQEEFYKFIKPILEKMDGTEELLVKLNREDLLRKQRTFDNGSIPHQIHLGELHAILRRQEDFYPFLKDNREKIEKILTFRIPYYVGPLARGNSRFAWMTRKSEETITPWNFEEVVDKGASAQSFIERMTNFDKNLPNEKVLPKHSLLYEYFTVYNELTKVKYVTEGMRKPAFLSGEQKKAIVDLLFKTNRKVTVKQLKEDYFKKIECFDSVEISGVEDRFNASLGTYHDLLKIIKDKDFLDNEENEDILEDIVLTLTLFEDREMIEERLKTYAHLFDDKVMKQLKRRRYTGWGRLSRKLINGIRDKQSGKTILDFLKSDGFANRNFMQLIHDDSLTFKEDIQKAQVSGQGDSLHEHIANLAGSPAIKKGILQTVKVVDELVKVMGRHKPENIVIEMARENQTTQKGQKNSRERMKRIEEGIKELGSQILKEHPVENTQLQNEKLYLYYLQNGRDMYVDQELDINRLSDYDVDHIVPQSFLKDDSIDNKVLTRSDKNRGKSDNVPSEEVVKKMKNYWRQLLNAKLITQRKFDNLTKAERGGLSELDKAGFIKRQLVETRQITKHVAQILDSRMNTKYDENDKLIREVKVITLKSKLVSDFRKDFQFYKVREINNYHHAHDAYLNAVVGTALIKKYPKLESEFVYGDYKVYDVRKMIAKSEQEIGKATAKYFFYSNIMNFFKTEITLANGEIRKRPLIETNGETGEIVWDKGRDFATVRKVLSMPQVNIVKKTEVQTGGFSKESILPKRNSDKLIARKKDWDPKKYGGFDSPTVAYSVLVVAKVEKGKSKKLKSVKELLGITIMERSSFEKNPIDFLEAKGYKEVKKDLIIKLPKYSLFELENGRKRMLASAGELQKGNELALPSKYVNFLYLASHYEKLKGSPEDNEQKQLFVEQHKHYLDEIIEQISEFSKRVILADANLDKVLSAYNKHRDKPIREQAENIIHLFTLTNLGAPAAFKYFDTTIDRKRYTSTKEVLDATLIHQSITGLYETRIDLSQLGGDEGADKRTADGSEFESPKKKRKV

SEQ ID NO: 188 - protein, 1588 aa, Artificial Sequence
  Description of Artificial Sequence: Synthetic polypeptide
MSEVEFSHEYWMRHALTLAKRARDEREVPVGAVLVLNNRVIGEGWNRAIGLHDPTAHAEIMALRQGGLVMQNYRLYDATLYVTFEPCVMCAGAMIHSRIGRVVFGVRNAKTGAAGSLMDVLHHPGMNHRVEITEGILADECAALLCRFFRMPRRVFNAQKKAQSSTDSGGSSGGSSGSETPGTSESATPESSGGSSGGSDKKYSIGLAIGTNSVGWAVITDEYKVPSKKFKVLGNTDRHSIKKNLIGALLFDSGETAEATRLKRTARRRYTRRKNRICYLQEIFSNEMAKVDDSFFHRLEESFLVEEDKKHERHPIFGNIVDEVAYHEKYPTIYHLRKKLVDSTDKADLRLIYLALAHMIKFRGHFLIEGDLNPDNSDVDKLFIQLVQTYNQLFEENPINASGVDAKAILSARLSKSRRLENLIAQLPGEKKNGLFGNLIALSLGLTPNFKSNFDLAEDAKLQLSKDTYDDDLDNLLAQIGDQYADLFLAAKNLSDAILLSDILRVNTEITKAPLSASMIKRYDEHHQDLTLLKALVRQQLPEKYKEIFFDQSKNGYAGYIDGGASQEEFYKFIKPILEKMDGTEELLVKLNREDLLRKQRTFDNGSIPHQIHLGELHAILRRQEDFYPFLKDNREKIEKILTFRIPYYVGPLARGNSRFAWMTRKSEETITPWNFEEVVDKGASAQSFIERMTNFDKNLPNEKVLPKHSLLYEYFTVYNELTKVKYVTEGMRKPAFLSGEQKKAIVDLLFKTNRKVTVKQLKEDYFKKIECFDSVEISGVEDRFNASLGTYHDLLKIIKDKDFLDNEENEDILEDIVLTLTLFEDREMIEERLKTYAHLFDDKVMKQLKRRRYTGWGRLSRKLINGIRDKQSGKTILDFLKSDGFANRNFMQLIHDDSLTFKEDIQKAQVSGQGDSLHEHIANLAGSPAIKKGILQTVKVVDELVKVMGRHKPENIVIEMARENQTTQKGQKNSRERMKRIEEGIKELGSQILKEHPVENTQLQNEKLYLYYLQNGRDMYVDQELDINRLSDYDVDHIVPQSFLKDDSIDNKVLTRSDKNRGKSDNVPSEEVVKKMKNYWRQLLNAKLITQRKFDNLTKAERGGLSELDKAGFIKRQLVETRQITKHVAQILDSRMNTKYDENDKLIREVKVITLKSKLVSDFRKDFQFYKVREINNYHHAHDAYLNAVVGTALIKKYPKLESEFVYGDYKVYDVRKMIAKSEQEIGKATAKYFFYSNIMNFFKTEITLANGEIRKRPLIETNGETGEIVWDKGRDFATVRKVLSMPQVNIVKKTEVQTGGFSKESILPKRNSDKLIARKKDWDPKKYGGFDSPTVAYSVLVVAKVEKGKSKKLKSVKELLGITIMERSSFEKNPIDFLEAKGYKEVKKDLIIKLPKYSLFELENGRKRMLASAGELQKGNELALPSKYVNFLYLASHYEKLKGSPEDNEQKQLFVEQHKHYLDEIIEQISEFSKRVILADANLDKVLSAYNKHRDKPIREQAENIIHLFTLTNLGAPAAFKYFDTTIDRKRYTSTKEVLDATLIHQSITGLYETRIDLSQLGGDEGADKRTADGSEFESPKKKRKV

SEQ ID NO: 189 - protein, 1786 aa, Artificial Sequence
  Description of Artificial Sequence: Synthetic polypeptide
MSEVEFSHEYWMRHALTLAKRAWDEREVPVGAVLVHNNRVIGEGWNRPIGRHDPTAHAEIMALRQGGLVMQNYRLIDATLYVTLEPCVMCAGAMIHSRIGRVVFGARDAKTGAAGSLMDVLHHPGMNHRVEITEGILADECAALLSDFFRMRRQEIKAQKKAQSSTDSGGSSGGSSGSETPGTSESATPESSGGSSGGSSEVEFSHEYWMRHALTLAKRARDEREVPVGAVLVLNNRVIGEGWNRAIGLHDPTAHAEIMALRQGGLVMQNYRLYDATLYVTFEPCVMCAGAMIHSRIGRVVFGVRNAKTGAAGSLMDVLHHPGMNHRVEITEGILADECAALLCRFFRMPRRVFNAQKKAQSSTDSGGSSGGSSGSETPGTSESATPESSGGSSGGSDKKYSIGLAIGTNSVGWAVITDEYKVPSKKFKVLGNTDRHSIKKNLIGALLFDSGETAEATRLKRTARRRYTRRKNRICYLQEIFSNEMAKVDDSFFHRLEESFLVEEDKKHERHPIFGNIVDEVAYHEKYPTIYHLRKKLVDSTDKADLRLIYLALAHMIKFRGHFLIEGDLNPDNSDVDKLFIQLVQTYNQLFEENPINASGVDAKAILSARLSKSRRLENLIAQLPGEKKNGLFGNLIALSLGLTPNFKSNFDLAEDAKLQLSKDTYDDDLDNLLAQIGDQYADLFLAAKNLSDAILLSDILRVNTEITKAPLSASMIKRYDEHHQDLTLLKALVRQQLPEKYKEIFFDQSKNGYAGYIDGGASQEEFYKFIKPILEKMDGTEELLVKLNREDLLRKQRTFDNGSIPHQIHLGELHAILRRQEDFYPFLKDNREKIEKILTFRIPYYVGPLARGNSRFAWMTRKSEETITPWNFEEVVDKGASAQSFIERMTNFDKNLPNEKVLPKHSLLYEYFTVYNELTKVKYVTEGMRKPAFLSGEQKKAIVDLLFKTNRKVTVKQLKEDYFKKIECFDSVEISGVEDRFNASLGTYHDLLKIIKDKDFLDNEENEDILEDIVLTLTLFEDREMIEERLKTYAHLFDDKVMKQLKRRRYTGWGRLSRKLINGIRDKQSGKTILDFLKSDGFANRNFMQLIHDDSLTFKEDIQKAQVSGQGDSLHEHIANLAGSPAIKKGILQTVKVVDELVKVMGRHKPENIVIEMARENQTTQKGQKNSRERMKRIEEGIKELGSQILKEHPVENTQLQNEKLYLYYLQNGRDMYVDQELDINRLSDYDVDHIVPQSFLKDDSIDNKVLTRSDKNRGKSDNVPSEEVVKKMKNYWRQLLNAKLITQRKFDNLTKAERGGLSELDKAGFIKRQLVETRQITKHVAQILDSRMNTKYDENDKLIREVKVITLKSKLVSDFRKDFQFYKVREINNYHHAHDAYLNAVVGTALIKKYPKLESEFVYGDYKVYDVRKMIAKSEQEIGKATAKYFFYSNIMNFFKTEITLANGEIRKRPLIETNGETGEIVWDKGRDFATVRKVLSMPQVNIVKKTEVQTGGFSKESILPKRNSDKLIARKKDWDPKKYGGFDSPTVAYSVLVVAKVEKGKSKKLKSVKELLGITIMERSSFEKNPIDFLEAKGYKEVKKDLIIKLPKYSLFELENGRKRMLASAGELQKGNELALPSKYVNFLYLASHYEKLKGSPEDNEQKQLFVEQHKHYLDEIIEQISEFSKRVILADANLDKVLSAYNKHRDKPIREQAENIIHLFTLTNLGAPAAFKYFDTTIDRKRYTSTKEVLDATLIHQSITGLYETRIDLSQLGGDEGADKRTADGSEFESPKKKRKV

SEQ ID NO: 190 - protein, 1588 aa, Artificial Sequence
  Description of Artificial Sequence: Synthetic polypeptide
MSEVEFSHEYWMRHALTLAKRARDEREVPVGAVLVLNNRVIGEGWNRAIGLHDPTAHAEIMALRQGGLVMQNYRLIDATLYSTFEPCVMCAGAMIHSRIGRVVFGVRNAKTGAAGSLMDVLHYPGMNHRVEITEGILADECAALLCYFFRMPRRVFNAQKKAQSSTDSGGSSGGSSGSETPGTSESATPESSGGSSGGSDKKYSIGLAIGTNSVGWAVITDEYKVPSKKFKVLGNTDRHSIKKNLIGALLFDSGETAEATRLKRTARRRYTRRKNRICYLQEIFSNEMAKVDDSFFHRLEESFLVEEDKKHERHPIFGNIVDEVAYHEKYPTIYHLRKKLVDSTDKADLRLIYLALAHMIKFRGHFLIEGDLNPDNSDVDKLFIQLVQTYNQLFEENPINASGVDAKAILSARLSKSRRLENLIAQLPGEKKNGLFGNLIALSLGLTPNFKSNFDLAEDAKLQLSKDTYDDDLDNLLAQIGDQYADLFLAAKNLSDAILLSDILRVNTEITKAPLSASMIKRYDEHHQDLTLLKALVRQQLPEKYKEIFFDQSKNGYAGYIDGGASQEEFYKFIKPILEKMDGTEELLVKLNREDLLRKQRTFDNGSIPHQIHLGELHAILRRQEDFYPFLKDNREKIEKILTFRIPYYVGPLARGNSRFAWMTRKSEETITPWNFEEVVDKGASAQSFIERMTNFDKNLPNEKVLPKHSLLYEYFTVYNELTKVKYVTEGMRKPAFLSGEQKKAIVDLLFKTNRKVTVKQLKEDYFKKIECFDSVEISGVEDRFNASLGTYHDLLKIIKDKDFLDNEENEDILEDIVLTLTLFEDREMIEERLKTYAHLFDDKVMKQLKRRRYTGWGRLSRKLINGIRDKQSGKTILDFLKSDGFANRNFMQLIHDDSLTFKEDIQKAQVSGQGDSLHEHIANLAGSPAIKKGILQTVKVVDELVKVMGRHKPENIVIEMARENQTTQKGQKNSRERMKRIEEGIKELGSQILKEHPVENTQLQNEKLYLYYLQNGRDMYVDQELDINRLSDYDVDHIVPQSFLKDDSIDNKVLTRSDKNRGKSDNVPSEEVVKKMKNYWRQLLNAKLITQRKFDNLTKAERGGLSELDKAGFIKRQLVETRQITKHVAQILDSRMNTKYDENDKLIREVKVITLKSKLVSDFRKDFQFYKVREINNYHHAHDAYLNAVVGTALIKKYPKLESEFVYGDYKVYDVRKMIAKSEQEIGKATAKYFFYSNIMNFFKTEITLANGEIRKRPLIETNGETGEIVWDKGRDFATVRKVLSMPQVNIVKKTEVQTGGFSKESILPKRNSDKLIARKKDWDPKKYGGFDSPTVAYSVLVVAKVEKGKSKKLKSVKELLGITIMERSSFEKNPIDFLEAKGYKEVKKDLIIKLPKYSLFELENGRKRMLASAGELQKGNELALPSKYVNFLYLASHYEKLKGSPEDNEQKQLFVEQHKHYLDEIIEQISEFSKRVILADANLDKVLSAYNKHRDKPIREQAENIIHLFTLTNLGAPAAFKYFDTTIDRKRYTSTKEVLDATLIHQSITGLYETRIDLSQLGGDEGADKRTADGSEFESPKKKRKV

SEQ ID NO: 191 - protein, 1786 aa, Artificial Sequence
  Description of Artificial Sequence: Synthetic polypeptide
MSEVEFSHEYWMRHALTLAKRAWDEREVPVGAVLVHNNRVIGEGWNRPIGRHDPTAHAEIMALRQGGLVMQNYRLIDATLYVTLEPCVMCAGAMIHSRIGRVVFGARDAKTGAAGSLMDVLHHPGMNHRVEITEGILADECAALLSDFFRMRRQEIKAQKKAQSSTDSGGSSGGSSGSETPGTSESATPESSGGSSGGSSEVEFSHEYWMRHALTLAKRARDEREVPVGAVLVLNNRVIGEGWNRAIGLHDPTAHAEIMALRQGGLVMQNYRLIDATLYSTFEPCVMCAGAMIHSRIGRVVFGVRNAKTGAAGSLMDVLHYPGMNHRVEITEGILADECAALLCYFFRMPRRVFNAQKKAQSSTDSGGSSGGSSGSETPGTSESATPESSGGSSGGSDKKYSIGLAIGTNSVGWAVITDEYKVPSKKFKVLGNTDRHSIKKNLIGALLFDSGETAEATRLKRTARRRYTRRKNRICYLQEIFSNEMAKVDDSFFHRLEESFLVEEDKKHERHPIFGNIVDEVAYHEKYPTIYHLRKKLVDSTDKADLRLIYLALAHMIKFRGHFLIEGDLNPDNSDVDKLFIQLVQTYNQLFEENPINASGVDAKAILSARLSKSRRLENLIAQLPGEKKNGLFGNLIALSLGLTPNFKSNFDLAEDAKLQLSKDTYDDDLDNLLAQIGDQYADLFLAAKNLSDAILLSDILRVNTEITKAPLSASMIKRYDEHHQDLTLLKALVRQQLPEKYKEIFFDQSKNGYAGYIDGGASQEEFYKFIKPILEKMDGTEELLVKLNREDLLRKQRTFDNGSIPHQIHLGELHAILRRQEDFYPFLKDNREKIEKILTFRIPYYVGPLARGNSRFAWMTRKSEETITPWNFEEVVDKGASAQSFIERMTNFDKNLPNEKVLPKHSLLYEYFTVYNELTKVKYVTEGMRKPAFLSGEQKKAIVDLLFKTNRKVTVKQLKEDYFKKIECFDSVEISGVEDRFNASLGTYHDLLKIIKDKDFLDNEENEDILEDIVLTLTLFEDREMIEERLKTYAHLFDDKVMKQLKRRRYTGWGRLSRKLINGIRDKQSGKTILDFLKSDGFANRNFMQLIHDDSLTFKEDIQKAQVSGQGDSLHEHIANLAGSPAIKKGILQTVKVVDELVKVMGRHKPENIVIEMARENQTTQKGQKNSRERMKRIEEGIKELGSQILKEHPVENTQLQNEKLYLYYLQNGRDMYVDQELDINRLSDYDVDHIVPQSFLKDDSIDNKVLTRSDKNRGKSDNVPSEEVVKKMKNYWRQLLNAKLITQRKFDNLTKAERGGLSELDKAGFIKRQLVETRQITKHVAQILDSRMNTKYDENDKLIREVKVITLKSKLVSDFRKDFQFYKVREINNYHHAHDAYLNAVVGTALIKKYPKLESEFVYGDYKVYDVRKMIAKSEQEIGKATAKYFFYSNIMNFFKTEITLANGEIRKRPLIETNGETGEIVWDKGRDFATVRKVLSMPQVNIVKKTEVQTGGFSKESILPKRNSDKLIARKKDWDPKKYGGFDSPTVAYSVLVVAKVEKGKSKKLKSVKELLGITIMERSSFEKNPIDFLEAKGYKEVKKDLIIKLPKYSLFELENGRKRMLASAGELQKGNELALPSKYVNFLYLASHYEKLKGSPEDNEQKQLFVEQHKHYLDEIIEQISEFSKRVILADANLDKVLSAYNKHRDKPIREQAENIIHLFTLTNLGAPAAFKYFDTTIDRKRYTSTKEVLDATLIHQSITGLYETRIDLSQLGGDEGADKRTADGSEFESPKKKRKV

SEQ ID NO: 192 - protein, 1588 aa, Artificial Sequence
  Description of Artificial Sequence: Synthetic polypeptide
MSEVEFSHEYWMRHALTLAKRARDEREVPVGAVLVLNNRVIGEGWNRAIGLHDPTAHAEIMALRQGGLVMQNYRLYDATLYSTFEPCVMCAGAMIHSRIGRVVFGVRNAKTGAAGSLMDVLHHPGMNHRVEITEGILADECAALLCRFFRMPRRVFNAQKKAQSSTDSGGSSGGSSGSETPGTSESATPESSGGSSGGSDKKYSIGLAIGTNSVGWAVITDEYKVPSKKFKVLGNTDRHSIKKNLIGALLFDSGETAEATRLKRTARRRYTRRKNRICYLQEIFSNEMAKVDDSFFHRLEESFLVEEDKKHERHPIFGNIVDEVAYHEKYPTIYHLRKKLVDSTDKADLRLIYLALAHMIKFRGHFLIEGDLNPDNSDVDKLFIQLVQTYNQLFEENPINASGVDAKAILSARLSKSRRLENLIAQLPGEKKNGLFGNLIALSLGLTPNFKSNFDLAEDAKLQLSKDTYDDDLDNLLAQIGDQYADLFLAAKNLSDAILLSDILRVNTEITKAPLSASMIKRYDEHHQDLTLLKALVRQQLPEKYKEIFFDQSKNGYAGYIDGGASQEEFYKFIKPILEKMDGTEELLVKLNREDLLRKQRTFDNGSIPHQIHLGELHAILRRQEDFYPFLKDNREKIEKILTFRIPYYVGPLARGNSRFAWMTRKSEETITPWNFEEVVDKGASAQSFIERMTNFDKNLPNEKVLPKHSLLYEYFTVYNELTKVKYVTEGMRKPAFLSGEQKKAIVDLLFKTNRKVTVKQLKEDYFKKIECFDSVEISGVEDRFNASLGTYHDLLKIIKDKDFLDNEENEDILEDIVLTLTLFEDREMIEERLKTYAHLFDDKVMKQLKRRRYTGWGRLSRKLINGIRDKQSGKTILDFLKSDGFANRNFMQLIHDDSLTFKEDIQKAQVSGQGDSLHEHIANLAGSPAIKKGILQTVKVVDELVKVMGRHKPENIVIEMARENQTTQKGQKNSRERMKRIEEGIKELGSQILKEHPVENTQLQNEKLYLYYLQNGRDMYVDQELDINRLSDYDVDHIVPQSFLKDDSIDNKVLTRSDKNRGKSDNVPSEEVVKKMKNYWRQLLNAKLITQRKFDNLTKAERGGLSELDKAGFIKRQLVETRQITKHVAQILDSRMNTKYDENDKLIREVKVITLKSKLVSDFRKDFQFYKVREINNYHHAHDAYLNAVVGTALIKKYPKLESEFVYGDYKVYDVRKMIAKSEQEIGKATAKYFFYSNIMNFFKTEITLANGEIRKRPLIETNGETGEIVWDKGRDFATVRKVLSMPQVNIVKKTEVQTGGFSKESILPKRNSDKLIARKKDWDPKKYGGFDSPTVAYSVLVVAKVEKGKSKKLKSVKELLGITIMERSSFEKNPIDFLEAKGYKEVKKDLIIKLPKYSLFELENGRKRMLASAGELQKGNELALPSKYVNFLYLASHYEKLKGSPEDNEQKQLFVEQHKHYLDEIIEQISEFSKRVILADANLDKVLSAYNKHRDKPIREQAENIIHLFTLTNLGAPAAFKYFDTTIDRKRYTSTKEVLDATLIHQSITGLYETRIDLSQLGGDEGADKRTADGSEFESPKKKRKV

SEQ ID NO: 193 - protein, 1786 aa, Artificial Sequence
  Description of Artificial Sequence: Synthetic polypeptide
MSEVEFSHEYWMRHALTLAKRAWDEREVPVGAVLVHNNRVIGEGWNRPIGRHDPTAHAEIMALRQGGLVMQNYRLIDATLYVTLEPCVMCAGAMIHSRIGRVVFGARDAKTGAAGSLMDVLHHPGMNHRVEITEGILADECAALLSDFFRMRRQEIKAQKKAQSSTDSGGSSGGSSGSETPGTSESATPESSGGSSGGSSEVEFSHEYWMRHALTLAKRARDEREVPVGAVLVLNNRVIGEGWNRAIGLHDPTAHAEIMALRQGGLVMQNYRLYDATLYSTFEPCVMCAGAMIHSRIGRVVFGVRNAKTGAAGSLMDVLHHPGMNHRVEITEGILADECAALLCRFFRMPRRVFNAQKKAQSSTDSGGSSGGSSGSETPGTSESATPESSGGSSGGSDKKYSIGLAIGTNSVGWAVITDEYKVPSKKFKVLGNTDRHSIKKNLIGALLFDSGETAEATRLKRTARRRYTRRKNRICYLQEIFSNEMAKVDDSFFHRLEESFLVEEDKKHERHPIFGNIVDEVAYHEKYPTIYHLRKKLVDSTDKADLRLIYLALAHMIKFRGHFLIEGDLNPDNSDVDKLFIQLVQTYNQLFEENPINASGVDAKAILSARLSKSRRLENLIAQLPGEKKNGLFGNLIALSLGLTPNFKSNFDLAEDAKLQLSKDTYDDDLDNLLAQIGDQYADLFLAAKNLSDAILLSDILRVNTEITKAPLSASMIKRYDEHHQDLTLLKALVRQQLPEKYKEIFFDQSKNGYAGYIDGGASQEEFYKFIKPILEKMDGTEELLVKLNREDLLRKQRTFDNGSIPHQIHLGELHAILRRQEDFYPFLKDNREKIEKILTFRIPYYVGPLARGNSRFAWMTRKSEETITPWNFEEVVDKGASAQSFIERMTNFDKNLPNEKVLPKHSLLYEYFTVYNELTKVKYVTEGMRKPAFLSGEQKKAIVDLLFKTNRKVTVKQLKEDYFKKIECFDSVEISGVEDRFNASLGTYHDLLKIIKDKDFLDNEENEDILEDIVLTLTLFEDREMIEERLKTYAHLFDDKVMKQLKRRRYTGWGRLSRKLINGIRDKQSGKTILDFLKSDGFANRNFMQLIHDDSLTFKEDIQKAQVSGQGDSLHEHIANLAGSPAIKKGILQTVKVVDELVKVMGRHKPENIVIEMARENQTTQKGQKNSRERMKRIEEGIKELGSQILKEHPVENTQLQNEKLYLYYLQNGRDMYVDQELDINRLSDYDVDHIVPQSFLKDDSIDNKVLTRSDKNRGKSDNVPSEEVVKKMKNYWRQLLNAKLITQRKFDNLTKAERGGLSELDKAGFIKRQLVETRQITKHVAQILDSRMNTKYDENDKLIREVKVITLKSKLVSDFRKDFQFYKVREINNYHHAHDAYLNAVVGTALIKKYPKLESEFVYGDYKVYDVRKMIAKSEQEIGKATAKYFFYSNIMNFFKTEITLANGEIRKRPLIETNGETGEIVWDKGRDFATVRKVLSMPQVNIVKKTEVQTGGFSKESILPKRNSDKLIARKKDWDPKKYGGFDSPTVAYSVLVVAKVEKGKSKKLKSVKELLGITIMERSSFEKNPIDFLEAKGYKEVKKDLIIKLPKYSLFELENGRKRMLASAGELQKGNELALPSKYVNFLYLASHYEKLKGSPEDNEQKQLFVEQHKHYLDEIIEQISEFSKRVILADANLDKVLSAYNKHRDKPIREQAENIIHLFTLTNLGAPAAFKYFDTTIDRKRYTSTKEVLDATLIHQSITGLYETRIDLSQLGGDEGADKRTADGSEFESPKKKRKV

SEQ ID NO: 194 - protein, 1588 aa, Artificial Sequence
  Description of Artificial Sequence: Synthetic polypeptide
MSEVEFSHEYWMRHALTLAKRARDEREVPVGAVLVLNNRVIGEGWNRAIGLHDPTAHAEIMALRQGGLVMQNYRLIDATLYVTFEPCVMCAGAMIHSRIGRVVFGVRNAKTGAAGSLMDVLHYPGMNHRVEITEGILADECAALLCTFFRMPRQVFNAQKKAQSSTDSGGSSGGSSGSETPGTSESATPESSGGSSGGSDKKYSIGLAIGTNSVGWAVITDEYKVPSKKFKVLGNTDRHSIKKNLIGALLFDSGETAEATRLKRTARRRYTRRKNRICYLQEIFSNEMAKVDDSFFHRLEESFLVEEDKKHERHPIFGNIVDEVAYHEKYPTIYHLRKKLVDSTDKADLRLIYLALAHMIKFRGHFLIEGDLNPDNSDVDKLFIQLVQTYNQLFEENPINASGVDAKAILSARLSKSRRLENLIAQLPGEKKNGLFGNLIALSLGLTPNFKSNFDLAEDAKLQLSKDTYDDDLDNLLAQIGDQYADLFLAAKNLSDAILLSDILRVNTEITKAPLSASMIKRYDEHHQDLTLLKALVRQQLPEKYKEIFFDQSKNGYAGYIDGGASQEEFYKFIKPILEKMDGTEELLVKLNREDLLRKQRTFDNGSIPHQIHLGELHAILRRQEDFYPFLKDNREKIEKILTFRIPYYVGPLARGNSRFAWMTRKSEETITPWNFEEVVDKGASAQSFIERMTNFDKNLPNEKVLPKHSLLYEYFTVYNELTKVKYVTEGMRKPAFLSGEQKKAIVDLLFKTNRKVTVKQLKEDYFKKIECFDSVEISGVEDRFNASLGTYHDLLKIIKDKDFLDNEENEDILEDIVLTLTLFEDREMIEERLKTYAHLFDDKVMKQLKRRRYTGWGRLSRKLINGIRDKQSGKTILDFLKSDGFANRNFMQLIHDDSLTFKEDIQKAQVSGQGDSLHEHIANLAGSPAIKKGILQTVKVVDELVKVMGRHKPENIVIEMARENQTTQKGQKNSRERMKRIEEGIKELGSQILKEHPVENTQLQNEKLYLYYLQNGRDMYVDQELDINRLSDYDVDHIVPQSFLKDDSIDNKVLTRSDKNRGKSDNVPSEEVVKKMKNYWRQLLNAKLITQRKFDNLTKAERGGLSELDKAGFIKRQLVETRQITKHVAQILDSRMNTKYDENDKLIREVKVITLKSKLVSDFRKDFQFYKVREINNYHHAHDAYLNAVVGTALIKKYPKLESEFVYGDYKVYDVRKMIAKSEQEIGKATAKYFFYSNIMNFFKTEITLANGEIRKRPLIETNGETGEIVWDKGRDFATVRKVLSMPQVNIVKKTEVQTGGFSKESILPKRNSDKLIARKKDWDPKKYGGFVSPTVAYSVLVVAKVEKGKSKKLKSVKELLGITIMERSSFEKNPIDFLEAKGYKEVKKDLIIKLPKYSLFELENGRKRMLASARELQKGNELALPSKYVNFLYLASHYEKLKGSPEDNEQKQLFVEQHKHYLDEIIEQISEFSKRVILADANLDKVLSAYNKHRDKPIREQAENIIHLFTLTNLGAPAAFKYFDTTIDRKQYRSTKEVLDATLIHQSITGLYETRIDLSQLGGDEGADKRTADGSEFESPKKKRKV

SEQ ID NO: 195 - protein, 1588 aa, Artificial Sequence
  Description of Artificial Sequence: Synthetic polypeptide
MSEVEFSHEYWMRHALTLAKRARDEREVPVGAVLVLNNRVIGEGWNRAIGLHDPTAHAEIMALRQGGLVMQNYRLIDATLYVTFEPCVMCAGAMIHSRIGRVVFGVRNAKTGAAGSLMDVLHYPGMNHRVEITEGILADECAALLCRFFRMPRQVFNAQKKAQSSTDSGGSSGGSSGSETPGTSESATPESSGGSSGGSDKKYSIGLAIGTNSVGWAVITDEYKVPSKKFKVLGNTDRHSIKKNLIGALLFDSGETAEATRLKRTARRRYTRRKNRICYLQEIFSNEMAKVDDSFFHRLEESFLVEEDKKHERHPIFGNIVDEVAYHEKYPTIYHLRKKLVDSTDKADLRLIYLALAHMIKFRGHFLIEGDLNPDNSDVDKLFIQLVQTYNQLFEENPINASGVDAKAILSARLSKSRRLENLIAQLPGEKKNGLFGNLIALSLGLTPNFKSNFDLAEDAKLQLSKDTYDDDLDNLLAQIGDQYADLFLAAKNLSDAILLSDILRVNTEITKAPLSASMIKRYDEHHQDLTLLKALVRQQLPEKYKEIFFDQSKNGYAGYIDGGASQEEFYKFIKPILEKMDGTEELLVKLNREDLLRKQRTFDNGSIPHQIHLGELHAILRRQEDFYPFLKDNREKIEKILTFRIPYYVGPLARGNSRFAWMTRKSEETITPWNFEEVVDKGASAQSFIERMTNFDKNLPNEKVLPKHSLLYEYFTVYNELTKVKYVTEGMRKPAFLSGEQKKAIVDLLFKTNRKVTVKQLKEDYFKKIECFDSVEISGVEDRFNASLGTYHDLLKIIKDKDFLDNEENEDILEDIVLTLTLFEDREMIEERLKTYAHLFDDKVMKQLKRRRYTGWGRLSRKLINGIRDKQSGKTILDFLKSDGFANRNFMQLIHDDSLTFKEDIQKAQVSGQGDSLHEHIANLAGSPAIKKGILQTVKVVDELVKVMGRHKPENIVIEMARENQTTQKGQKNSRERMKRIEEGIKELGSQILKEHPVENTQLQNEKLYLYYLQNGRDMYVDQELDINRLSDYDVDHIVPQSFLKDDSIDNKVLTRSDKNRGKSDNVPSEEVVKKMKNYWRQLLNAKLITQRKFDNLTKAERGGLSELDKAGFIKRQLVETRQITKHVAQILDSRMNTKYDENDKLIREVKVITLKSKLVSDFRKDFQFYKVREINNYHHAHDAYLNAVVGTALIKKYPKLESEFVYGDYKVYDVRKMIAKSEQEIGKATAKYFFYSNIMNFFKTEITLANGEIRKRPLIETNGETGEIVWDKGRDFATVRKVLSMPQVNIVKKTEVQTGGFSKESILPKRNSDKLIARKKDWDPKKYGGFVSPTVAYSVLVVAKVEKGKSKKLKSVKELLGITIMERSSFEKNPIDFLEAKGYKEVKKDLIIKLPKYSLFELENGRKRMLASARELQKGNELALPSKYVNFLYLASHYEKLKGSPEDNEQKQLFVEQHKHYLDEIIEQISEFSKRVILADANLDKVLSAYNKHRDKPIREQAENIIHLFTLTNLGAPAAFKYFDTTIDRKQYRSTKEVLDATLIHQSITGLYETRIDLSQLGGDEGADKRTADGSEFESPKKKRKV

SEQ ID NO: 196 - protein, 1588 aa, Artificial Sequence
  Description of Artificial Sequence: Synthetic polypeptide
MSEVEFSHEYWMRHALTLAKRARDEREVPVGAVLVLNNRVIGEGWNRAIGLHDPTAHAEIMALRQGGLVMQNYRLIDATLYVTFEPCVMCAGAMIHSRIGRVVFGVRNAKTGAAGSLMDVLHYPGMNHRVEITEGILADECAALLCYFFRMPRSVFNAQKKAQSSTDSGGSSGGSSGSETPGTSESATPESSGGSSGGSDKKYSIGLAIGTNSVGWAVITDEYKVPSKKFKVLGNTDRHSIKKNLIGALLFDSGETAEATRLKRTARRRYTRRKNRICYLQEIFSNEMAKVDDSFFHRLEESFLVEEDKKHERHPIFGNIVDEVAYHEKYPTIYHLRKKLVDSTDKADLRLIYLALAHMIKFRGHFLIEGDLNPDNSDVDKLFIQLVQTYNQLFEENPINASGVDAKAILSARLSKSRRLENLIAQLPGEKKNGLFGNLIALSLGLTPNFKSNFDLAEDAKLQLSKDTYDDDLDNLLAQIGDQYADLFLAAKNLSDAILLSDILRVNTEITKAPLSASMIKRYDEHHQDLTLLKALVRQQLPEKYKEIFFDQSKNGYAGYIDGGASQEEFYKFIKPILEKMDGTEELLVKLNREDLLRKQRTFDNGSIPHQIHLGELHAILRRQEDFYPFLKDNREKIEKILTFRIPYYVGPLARGNSRFAWMTRKSEETITPWNFEEVVDKGASAQSFIERMTNFDKNLPNEKVLPKHSLLYEYFTVYNELTKVKYVTEGMRKPAFLSGEQKKAIVDLLFKTNRKVTVKQLKEDYFKKIECFDSVEISGVEDRFNASLGTYHDLLKIIKDKDFLDNEENEDILEDIVLTLTLFEDREMIEERLKTYAHLFDDKVMKQLKRRRYTGWGRLSRKLINGIRDKQSGKTILDFLKSDGFANRNFMQLIHDDSLTFKEDIQKAQVSGQGDSLHEHIANLAGSPAIKKGILQTVKVVDELVKVMGRHKPENIVIEMARENQTTQKGQKNSRERMKRIEEGIKELGSQILKEHPVENTQLQNEKLYLYYLQNGRDMYVDQELDINRLSDYDVDHIVPQSFLKDDSIDNKVLTRSDKNRGKSDNVPSEEVVKKMKNYWRQLLNAKLITQRKFDNLTKAERGGLSELDKAGFIKRQLVETRQITKHVAQILDSRMNTKYDENDKLIREVKVITLKSKLVSDFRKDFQFYKVREINNYHHAHDAYLNAVVGTALIKKYPKLESEFVYGDYKVYDVRKMIAKSEQEIGKATAKYFFYSNIMNFFKTEITLANGEIRKRPLIETNGETGEIVWDKGRDFATVRKVLSMPQVNIVKKTEVQTGGFSKESILPKRNSDKLIARKKDWDPKKYGGFVSPTVAYSVLVVAKVEKGKSKKLKSVKELLGITIMERSSFEKNPIDFLEAKGYKEVKKDLIIKLPKYSLFELENGRKRMLASARELQKGNELALPSKYVNFLYLASHYEKLKGSPEDNEQKQLFVEQHKHYLDEIIEQISEFSKRVILADANLDKVLSAYNKHRDKPIREQAENIIHLFTLTNLGAPAAFKYFDTTIDRKQYRSTKEVLDATLIHQSITGLYETRIDLSQLGGDEGADKRTADGSEFESPKKKRKV

SEQ ID NO: 197 - protein, 1588 aa, Artificial Sequence
  Description of Artificial Sequence: Synthetic polypeptide
MSEVEFSHEYWMRHALTLAKRARDEREVPVGAVLVLNNRVIGEGWNRAIGLHDPTAHAEIMALRQGGLVMQNYRLIDATLYVTFEPCVMCAGAMIHSRIGRVVFGVRNAKTGAAGSLMDVLHHPGMNHRVEITEGILADECAALLCYFFRMPRQVFNAQKKAQSSTDSGGSSGGSSGSETPGTSESATPESSGGSSGGSDKKYSIGLAIGTNSVGWAVITDEYKVPSKKFKVLGNTDRHSIKKNLIGALLFDSGETAEATRLKRTARRRYTRRKNRICYLQEIFSNEMAKVDDSFFHRLEESFLVEEDKKHERHPIFGNIVDEVAYHEKYPTIYHLRKKLVDSTDKADLRLIYLALAHMIKFRGHFLIEGDLNPDNSDVDKLFIQLVQTYNQLFEENPINASGVDAKAILSARLSKSRRLENLIAQLPGEKKNGLFGNLIALSLGLTPNFKSNFDLAEDAKLQLSKDTYDDDLDNLLAQIGDQYADLFLAAKNLSDAILLSDILRVNTEITKAPLSASMIKRYDEHHQDLTLLKALVRQQLPEKYKEIFFDQSKNGYAGYIDGGASQEEFYKFIKPILEKMDGTEELLVKLNREDLLRKQRTFDNGSIPHQIHLGELHAILRRQEDFYPFLKDNREKIEKILTFRIPYYVGPLARGNSRFAWMTRKSEETITPWNFEEVVDKGASAQSFIERMTNFDKNLPNEKVLPKHSLLYEYFTVYNELTKVKYVTEGMRKPAFLSGEQKKAIVDLLFKTNRKVTVKQLKEDYFKKIECFDSVEISGVEDRFNASLGTYHDLLKIIKDKDFLDNEENEDILEDIVLTLTLFEDREMIEERLKTYAHLFDDKVMKQLKRRRYTGWGRLSRKLINGIRDKQSGKTILDFLKSDGFANRNFMQLIHDDSLTFKEDIQKAQVSGQGDSLHEHIANLAGSPAIKKGILQTVKVVDELVKVMGRHKPENIVIEMARENQTTQKGQKNSRERMKRIEEGIKELGSQILKEHPVENTQLQNEKLYLYYLQNGRDMYVDQELDINRLSDYDVDHIVPQSFLKDDSIDNKVLTRSDKNRGKSDNVPSEEVVKKMKNYWRQLLNAKLITQRKFDNLTKAERGGLSELDKAGFIKRQLVETRQITKHVAQILDSRMNTKYDENDKLIREVKVITLKSKLVSDFRKDFQFYKVREINNYHHAHDAYLNAVVGTALIKKYPKLESEFVYGDYKVYDVRKMIAKSEQEIGKATAKYFFYSNIMNFFKTEITLANGEIRKRPLIETNGETGEIVWDKGRDFATVRKVLSMPQVNIVKKTEVQTGGFSKESILPKRNSDKLIARKKDWDPKKYGGFVSPTVAYSVLVVAKVEKGKSKKLKSVKELLGITIMERSSFEKNPIDFLEAKGYKEVKKDLIIKLPKYSLFELENGRKRMLASARELQKGNELALPSKYVNFLYLASHYEKLKGSPEDNEQKQLFVEQHKHYLDEIIEQISEFSKRVILADANLDKVLSAYNKHRDKPIREQAENIIHLFTLTNLGAPAAFKYFDTTIDRKQYRSTKEVLDATLIHQSITGLYETRIDLSQLGGDEGADKRTADGSEFESPKKKRKV

SEQ ID NO: 198 - protein, 1588 aa, Artificial Sequence
  Description of Artificial Sequence: Synthetic polypeptide
MSEVEFSHEYWMRHALTLAKRARDEREVPVGAVLVLNNRVIGEGWNRAIGLHDPTAHAEIMALRQGGLVMQNYRLIDATLYSTFEPCVMCAGAMIHSRIGRVVFGVRNAKTGAAGSLMDVLHYPGMNHRVEITEGILADECAALLCYFFRMPRQVFNAQKKAQSSTDSGGSSGGSSGSETPGTSESATPESSGGSSGGSDKKYSIGLAIGTNSVGWAVITDEYKVPSKKFKVLGNTDRHSIKKNLIGALLFDSGETAEATRLKRTARRRYTRRKNRICYLQEIFSNEMAKVDDSFFHRLEESFLVEEDKKHERHPIFGNIVDEVAYHEKYPTIYHLRKKLVDSTDKADLRLIYLALAHMIKFRGHFLIEGDLNPDNSDVDKLFIQLVQTYNQLFEENPINASGVDAKAILSARLSKSRRLENLIAQLPGEKKNGLFGNLIALSLGLTPNFKSNFDLAEDAKLQLSKDTYDDDLDNLLAQIGDQYADLFLAAKNLSDAILLSDILRVNTEITKAPLSASMIKRYDEHHQDLTLLKALVRQQLPEKYKEIFFDQSKNGYAGYIDGGASQEEFYKFIKPILEKMDGTEELLVKLNREDLLRKQRTFDNGSIPHQIHLGELHAILRRQEDFYPFLKDNREKIEKILTFRIPYYVGPLARGNSRFAWMTRKSEETITPWNFEEVVDKGASAQSFIERMTNFDKNLPNEKVLPKHSLLYEYFTVYNELTKVKYVTEGMRKPAFLSGEQKKAIVDLLFKTNRKVTVKQLKEDYFKKIECFDSVEISGVEDRFNASLGTYHDLLKIIKDKDFLDNEENEDILEDIVLTLTLFEDREMIEERLKTYAHLFDDKVMKQLKRRRYTGWGRLSRKLINGIRDKQSGKTILDFLKSDGFANRNFMQLIHDDSLTFKEDIQKAQVSGQGDSLHEHIANLAGSPAIKKGILQTVKVVDELVKVMGRHKPENIVIEMARENQTTQKGQKNSRERMKRIEEGIKELGSQILKEHPVENTQLQNEKLYLYYLQNGRDMYVDQELDINRLSDYDVDHIVPQSFLKDDSIDNKVLTRSDKNRGKSDNVPSEEVVKKMKNYWRQLLNAKLITQRKFDNLTKAERGGLSELDKAGFIKRQLVETRQITKHVAQILDSRMNTKYDENDKLIREVKVITLKSKLVSDFRKDFQFYKVREINNYHHAHDAYLNAVVGTALIKKYPKLESEFVYGDYKVYDVRKMIAKSEQEIGKATAKYFFYSNIMNFFKTEITLANGEIRKRPLIETNGETGEIVWDKGRDFATVRKVLSMPQVNIVKKTEVQTGGFSKESILPKRNSDKLIARKKDWDPKKYGGFVSPTVAYSVLVVAKVEKGKSKKLKSVKELLGITIMERSSFEKNPIDFLEAKGYKEVKKDLIIKLPKYSLFELENGRKRMLASARELQKGNELALPSKYVNFLYLASHYEKLKGSPEDNEQKQLFVEQHKHYLDEIIEQISEFSKRVILADANLDKVLSAYNKHRDKPIREQAENIIHLFTLTNLGAPAAFKYFDTTIDRKQYRSTKEVLDATLIHQSITGLYETRIDLSQLGGDEGADKRTADGSEFESPKKKRKV

SEQ ID NO: 199 - protein, 1588 aa, Artificial Sequence
  Description of Artificial Sequence: Synthetic polypeptide
MSEVEFSHEYWMRHALTLAKRARDEREVPVGAVLVLNNRVIGEGWNRAIGLHDPTAHAEIMALRQGGLVMQNYRLIDATLYVTFEPCVMCAGAMIHSRIGRVVFGVRNAKTGAAGSLMDVLHYPGMNHRVEITEGILADECAALLCYFFRMPRQVFNAQKKAQSSRDSGGSSGGSSGSETPGTSESATPESSGGSSGGSDKKYSIGLAIGTNSVGWAVITDEYKVPSKKFKVLGNTDRHSIKKNLIGALLFDSGETAEATRLKRTARRRYTRRKNRICYLQEIFSNEMAKVDDSFFHRLEESFLVEEDKKHERHPIFGNIVDEVAYHEKYPTIYHLRKKLVDSTDKADLRLIYLALAHMIKFRGHFLIEGDLNPDNSDVDKLFIQLVQTYNQLFEENPINASGVDAKAILSARLSKSRRLENLIAQLPGEKKNGLFGNLIALSLGLTPNFKSNFDLAEDAKLQLSKDTYDDDLDNLLAQIGDQYADLFLAAKNLSDAILLSDILRVNTEITKAPLSASMIKRYDEHHQDLTLLKALVRQQLPEKYKEIFFDQSKNGYAGYIDGGASQEEFYKFIKPILEKMDGTEELLVKLNREDLLRKQRTFDNGSIPHQIHLGELHAILRRQEDFYPFLKDNREKIEKILTFRIPYYVGPLARGNSRFAWMTRKSEETITPWNFEEVVDKGASAQSFIERMTNFDKNLPNEKVLPKHSLLYEYFTVYNELTKVKYVTEGMRKPAFLSGEQKKAIVDLLFKTNRKVTVKQLKEDYFKKIECFDSVEISGVEDRFNASLGTYHDLLKIIKDKDFLDNEENEDILEDIVLTLTLFEDREMIEERLKTYAHLFDDKVMKQLKRRRYTGWGRLSRKLINGIRDKQSGKTILDFLKSDGFANRNFMQLIHDDSLTFKEDIQKAQVSGQGDSLHEHIANLAGSPAIKKGILQTVKVVDELVKVMGRHKPENIVIEMARENQTTQKGQKNSRERMKRIEEGIKELGSQILKEHPVENTQLQNEKLYLYYLQNGRDMYVDQELDINRLSDYDVDHIVPQSFLKDDSIDNKVLTRSDKNRGKSDNVPSEEVVKKMKNYWRQLLNAKLITQRKFDNLTKAERGGLSELDKAGFIKRQLVETRQITKHVAQILDSRMNTKYDENDKLIREVKVITLKSKLVSDFRKDFQFYKVREINNYHHAHDAYLNAVVGTALIKKYPKLESEFVYGDYKVYDVRKMIAKSEQEIGKATAKYFFYSNIMNFFKTEITLANGEIRKRPLIETNGETGEIVWDKGRDFATVRKVLSMPQVNIVKKTEVQTGGFSKESILPKRNSDKLIARKKDWDPKKYGGFVSPTVAYSVLVVAKVEKGKSKKLKSVKELLGITIMERSSFEKNPIDFLEAKGYKEVKKDLIIKLPKYSLFELENGRKRMLASARELQKGNELALPSKYVNFLYLASHYEKLKGSPEDNEQKQLFVEQHKHYLDEIIEQISEFSKRVILADANLDKVLSAYNKHRDKPIREQAENIIHLFTLTNLGAPAAFKYFDTTIDRKQYRSTKEVLDATLIHQSITGLYETRIDLSQLGGDEGADKRTADGSEFESPKKKRKV

SEQ ID NO: 200 - protein, 1588 aa, Artificial Sequence
  Description of Artificial Sequence: Synthetic polypeptide
MSEVEFSHEYWMRHALTLAKRARDEREVPVGAVLVLNNRVIGEGWNRAIGLHDPTAHAEIMALRQGGLVMQNYRLIDATLYVTFEPCVMCAGAMIHSRIGRVVFGVRNAKTGAAGSLMDVLHYPGMNHRVEITEGILADECAALLCYFFRMPRRVFNAQKKAQSSTDSGGSSGGSSGSETPGTSESATPESSGGSSGGSDKKYSIGLAIGTNSVGWAVITDEYKVPSKKFKVLGNTDRHSIKKNLIGALLFDSGETAEATRLKRTARRRYTRRKNRICYLQEIFSNEMAKVDDSFFHRLEESFLVEEDKKHERHPIFGNIVDEVAYHEKYPTIYHLRKKLVDSTDKADLRLIYLALAHMIKFRGHFLIEGDLNPDNSDVDKLFIQLVQTYNQLFEENPINASGVDAKAILSARLSKSRRLENLIAQLPGEKKNGLFGNLIALSLGLTPNFKSNFDLAEDAKLQLSKDTYDDDLDNLLAQIGDQYADLFLAAKNLSDAILLSDILRVNTEITKAPLSASMIKRYDEHHQDLTLLKALVRQQLPEKYKEIFFDQSKNGYAGYIDGGASQEEFYKFIKPILEKMDGTEELLVKLNREDLLRKQRTFDNGSIPHQIHLGELHAILRRQEDFYPFLKDNREKIEKILTFRIPYYVGPLARGNSRFAWMTRKSEETITPWNFEEVVDKGASAQSFIERMTNFDKNLPNEKVLPKHSLLYEYFTVYNELTKVKYVTEGMRKPAFLSGEQKKAIVDLLFKTNRKVTVKQLKEDYFKKIECFDSVEISGVEDRFNASLGTYHDLLKIIKDKDFLDNEENEDILEDIVLTLTLFEDREMIEERLKTYAHLFDDKVMKQLKRRRYTGWGRLSRKLINGIRDKQSGKTILDFLKSDGFANRNFMQLIHDDSLTFKEDIQKAQVSGQGDSLHEHIANLAGSPAIKKGILQTVKVVDELVKVMGRHKPENIVIEMARENQTTQKGQKNSRERMKRIEEGIKELGSQILKEHPVENTQLQNEKLYLYYLQNGRDMYVDQELDINRLSDYDVDHIVPQSFLKDDSIDNKVLTRSDKNRGKSDNVPSEEVVKKMKNYWRQLLNAKLITQRKFDNLTKAERGGLSELDKAGFIKRQLVETRQITKHVAQILDSRMNTKYDENDKLIREVKVITLKSKLVSDFRKDFQFYKVREINNYHHAHDAYLNAVVGTALIKKYPKLESEFVYGDYKVYDVRKMIAKSEQEIGKATAKYFFYSNIMNFFKTEITLANGEIRKRPLIETNGETGEIVWDKGRDFATVRKVLSMPQVNIVKKTEVQTGGFSKESILPKRNSDKLIARKKDWDPKKYGGFVSPTVAYSVLVVAKVEKGKSKKLKSVKELLGITIMERSSFEKNPIDFLEAKGYKEVKKDLIIKLPKYSLFELENGRKRMLASARELQKGNELALPSKYVNFLYLASHYEKLKGSPEDNEQKQLFVEQHKHYLDEIIEQISEFSKRVILADANLDKVLSAYNKHRDKPIREQAENIIHLFTLTNLGAPAAFKYFDTTIDRKQYRSTKEVLDATLIHQSITGLYETRIDLSQLGGDEGADKRTADGSEFESPKKKRKV

SEQ ID NO: 201 - protein, 1588 aa, Artificial Sequence
  Description of Artificial Sequence: Synthetic polypeptide
MSEVEFSHEYWMRHALTLAKRARDEREVPVGAVLVLNNRVIGEGWNRAIGLHDPTAHAEIMALRQGGLVMQNYRLIDATLYVTFEPCVMCAGAMIHSRIGRVVFGVRNAKTGAAGSLMDVLHHPGMNHRVEITEGILADECAALLCRFFRMPRRVFNAQKKAQSSTDSGGSSGGSSGSETPGTSESATPESSGGSSGGSDKKYSIGLAIGTNSVGWAVITDEYKVPSKKFKVLGNTDRHSIKKNLIGALLFDSGETAEATRLKRTARRRYTRRKNRICYLQEIFSNEMAKVDDSFFHRLEESFLVEEDKKHERHPIFGNIVDEVAYHEKYPTIYHLRKKLVDSTDKADLRLIYLALAHMIKFRGHFLIEGDLNPDNSDVDKLFIQLVQTYNQLFEENPINASGVDAKAILSARLSKSRRLENLIAQLPGEKKNGLFGNLIALSLGLTPNFKSNFDLAEDAKLQLSKDTYDDDLDNLLAQIGDQYADLFLAAKNLSDAILLSDILRVNTEITKAPLSASMIKRYDEHHQDLTLLKALVRQQLPEKYKEIFFDQSKNGYAGYIDGGASQEEFYKFIKPILEKMDGTEELLVKLNREDLLRKQRTFDNGSIPHQIHLGELHAILRRQEDFYPFLKDNREKIEKILTFRIPYYVGPLARGNSRFAWMTRKSEETITPWNFEEVVDKGASAQSFIERMTNFDKNLPNEKVLPKHSLLYEYFTVYNELTKVKYVTEGMRKPAFLSGEQKKAIVDLLFKTNRKVTVKQLKEDYFKKIECFDSVEISGVEDRFNASLGTYHDLLKIIKDKDFLDNEENEDILEDIVLTLTLFEDREMIEERLKTYAHLFDDKVMKQLKRRRYTGWGRLSRKLINGIRDKQSGKTILDFLKSDGFANRNFMQLIHDDSLTFKEDIQKAQVSGQGDSLHEHIANLAGSPAIKKGILQTVKVVDELVKVMGRHKPENIVIEMARENQTTQKGQKNSRERMKRIEEGIKELGSQILKEHPVENTQLQNEKLYLYYLQNGRDMYVDQELDINRLSDYDVDHIVPQSFLKDDSIDNKVLTRSDKNRGKSDNVPSEEVVKKMKNYWRQLLNAKLITQRKFDNLTKAERGGLSELDKAGFIKRQLVETRQITKHVAQILDSRMNTKYDENDKLIREVKVITLKSKLVSDFRKDFQFYKVREINNYHHAHDAYLNAVVGTALIKKYPKLESEFVYGDYKVYDVRKMIAKSEQEIGKATAKYFFYSNIMNFFKTEITLANGEIRKRPLIETNGETGEIVWDKGRDFATVRKVLSMPQVNIVKKTEVQTGGFSKESILPKRNSDKLIARKKDWDPKKYGGFVSPTVAYSVLVVAKVEKGKSKKLKSVKELLGITIMERSSFEKNPIDFLEAKGYKEVKKDLIIKLPKYSLFELENGRKRMLASARELQKGNELALPSKYVNFLYLASHYEKLKGSPEDNEQKQLFVEQHKHYLDEIIEQISEFSKRVILADANLDKVLSAYNKHRDKPIREQAENIIHLFTLTNLGAPAAFKYFDTTIDRKQYRSTKEVLDATLIHQSITGLYETRIDLSQLGGDEGADKRTADGSEFESPKKKRKV

SEQ ID NO: 202 - protein, 1588 aa, Artificial Sequence
  Description of Artificial Sequence: Synthetic polypeptide
MSEVEFSHEYWMRHALTLAKRARDEREVPVGAVLVLNNRVIGEGWNRAIGLHDPTAHAEIMALRQGGLVMQNYRLYDATLYVTFEPCVMCAGAMIHSRIGRVVFGVRNAKTGAAGSLMDVLHYPGMNHRVEITEGILADECAALLCRFFRMPRRVFNAQKKAQSSTDSGGSSGGSSGSETPGTSESATPESSGGSSGGSDKKYSIGLAIGTNSVGWAVITDEYKVPSKKFKVLGNTDRHSIKKNLIGALLFDSGETAEATRLKRTARRRYTRRKNRICYLQEIFSNEMAKVDDSFFHRLEESFLVEEDKKHERHPIFGNIVDEVAYHEKYPTIYHLRKKLVDSTDKADLRLIYLALAHMIKFRGHFLIEGDLNPDNSDVDKLFIQLVQTYNQLFEENPINASGVDAKAILSARLSKSRRLENLIAQLPGEKKNGLFGNLIALSLGLTPNFKSNFDLAEDAKLQLSKDTYDDDLDNLLAQIGDQYADLFLAAKNLSDAILLSDILRVNTEITKAPLSASMIKRYDEHHQDLTLLKALVRQQLPEKYKEIFFDQSKNGYAGYIDGGASQEEFYKFIKPILEKMDGTEELLVKLNREDLLRKQRTFDNGSIPHQIHLGELHAILRRQEDFYPFLKDNREKIEKILTFRIPYYVGPLARGNSRFAWMTRKSEETITPWNFEEVVDKGASAQSFIERMTNFDKNLPNEKVLPKHSLLYEYFTVYNELTKVKYVTEGMRKPAFLSGEQKKAIVDLLFKTNRKVTVKQLKEDYFKKIECFDSVEISGVEDRFNASLGTYHDLLKIIKDKDFLDNEENEDILEDIVLTLTLFEDREMIEERLKTYAHLFDDKVMKQLKRRRYTGWGRLSRKLINGIRDKQSGKTILDFLKSDGFANRNFMQLIHDDSLTFKEDIQKAQVSGQGDSLHEHIANLAGSPAIKKGILQTVKVVDELVKVMGRHKPENIVIEMARENQTTQKGQKNSRERMKRIEEGIKELGSQILKEHPVENTQLQNEKLYLYYLQNGRDMYVDQELDINRLSDYDVDHIVPQSFLKDDSIDNKVLTRSDKNRGKSDNVPSEEVVKKMKNYWRQLLNAKLITQRKFDNLTKAERGGLSELDKAGFIKRQLVETRQITKHVAQILDSRMNTKYDENDKLIREVKVITLKSKLVSDFRKDFQFYKVREINNYHHAHDAYLNAVVGTALIKKYPKLESEFVYGDYKVYDVRKMIAKSEQEIGKATAKYFFYSNIMNFFKTEITLANGEIRKRPLIETNGETGEIVWDKGRDFATVRKVLSMPQVNIVKKTEVQTGGFSKESILPKRNSDKLIARKKDWDPKKYGGFVSPTVAYSVLVVAKVEKGKSKKLKSVKELLGITIMERSSFEKNPIDFLEAKGYKEVKKDLIIKLPKYSLFELENGRKRMLASARELQKGNELALPSKYVNFLYLASHYEKLKGSPEDNEQKQLFVEQHKHYLDEIIEQISEFSKRVILADANLDKVLSAYNKHRDKPIREQAENIIHLFTLTNLGAPAAFKYFDTTIDRKQYRSTKEVLDATLIHQSITGLYETRIDLSQLGGDEGADKRTADGSEFESPKKKRKV

SEQ ID NO: 203 - protein, 1588 aa, Artificial Sequence
  Description of Artificial Sequence: Synthetic polypeptide
MSEVEFSHEYWMRHALTLAKRARDEREVPVGAVLVLNNRVIGEGWNRAIGLHDPTAHAEIMALRQGGLVMQNYRLIDATLYVTFEPCVMCAGAMIHSRIGRVVFGVRNAKTGAAGSLMDVLHYPGMNHRVEITEGILADECAALLCRFFRMPRRVFNAQKKAQSSRDSGGSSGGSSGSETPGTSESATPESSGGSSGGSDKKYSIGLAIGTNSVGWAVITDEYKVPSKKFKVLGNTDRHSIKKNLIGALLFDSGETAEATRLKRTARRRYTRRKNRICYLQEIFSNEMAKVDDSFFHRLEESFLVEEDKKHERHPIFGNIVDEVAYHEKYPTIYHLRKKLVDSTDKADLRLIYLALAHMIKFRGHFLIEGDLNPDNSDVDKLFIQLVQTYNQLFEENPINASGVDAKAILSARLSKSRRLENLIAQLPGEKKNGLFGNLIALSLGLTPNFKSNFDLAEDAKLQLSKDTYDDDLDNLLAQIGDQYADLFLAAKNLSDAILLSDILRVNTEITKAPLSASMIKRYDEHHQDLTLLKALVRQQLPEKYKEIFFDQSKNGYAGYIDGGASQEEFYKFIKPILEKMDGTEELLVKLNREDLLRKQRTFDNGSIPHQIHLGELHAILRRQEDFYPFLKDNREKIEKILTFRIPYYVGPLARGNSRFAWMTRKSEETITPWNFEEVVDKGASAQSFIERMTNFDKNLPNEKVLPKHSLLYEYFTVYNELTKVKYVTEGMRKPAFLSGEQKKAIVDLLFKTNRKVTVKQLKEDYFKKIECFDSVEISGVEDRFNASLGTYHDLLKIIKDKDFLDNEENEDILEDIVLTLTLFEDREMIEERLKTYAHLFDDKVMKQLKRRRYTGWGRLSRKLINGIRDKQSGKTILDFLKSDGFANRNFMQLIHDDSLTFKEDIQKAQVSGQGDSLHEHIANLAGSPAIKKGILQTVKVVDELVKVMGRHKPENIVIEMARENQTTQKGQKNSRERMKRIEEGIKELGSQILKEHPVENTQLQNEKLYLYYLQNGRDMYVDQELDINRLSDYDVDHIVPQSFLKDDSIDNKVLTRSDKNRGKSDNVPSEEVVKKMKNYWRQLLNAKLITQRKFDNLTKAERGGLSELDKAGFIKRQLVETRQITKHVAQILDSRMNTKYDENDKLIREVKVITLKSKLVSDFRKDFQFYKVREINNYHHAHDAYLNAVVGTALIKKYPKLESEFVYGDYKVYDVRKMIAKSEQEIGKATAKYFFYSNIMNFFKTEITLANGEIRKRPLIETNGETGEIVWDKGRDFATVRKVLSMPQVNIVKKTEVQTGGFSKESILPKRNSDKLIARKKDWDPKKYGGFVSPTVAYSVLVVAKVEKGKSKKLKSVKELLGITIMERSSFEKNPIDFLEAKGYKEVKKDLIIKLPKYSLFELENGRKRMLASARELQKGNELALPSKYVNFLYLASHYEKLKGSPEDNEQKQLFVEQHKHYLDEIIEQISEFSKRVILADANLDKVLSAYNKHRDKPIREQAENIIHLFTLTNLGAPAAFKYFDTTIDRKQYRSTKEVLDATLIHQSITGLYETRIDLSQLGGDEGADKRTADGSEFESPKKKRKV

SEQ ID NO: 204 - protein, 1588 aa, Artificial Sequence
  Description of Artificial Sequence: Synthetic polypeptide
MSEVEFSHEYWMRHALTLAKRARDEREVPVGAVLVLNNRVIGEGWNRAIGLHDPTAHAEIMALRQGGLVMQNYRLIDATLYVTFEPCVMCAGAMIHSRIGRVVFGVRNAKTGAAGSLMDVLHYPGMNHRVEITEGILADECAALLCTFFRMPRRVFNAQKKAQSSTDSGGSSGGSSGSETPGTSESATPESSGGSSGGSDKKYSIGLAIGTNSVGWAVITDEYKVPSKKFKVLGNTDRHSIKKNLIGALLFDSGETAEATRLKRTARRRYTRRKNRICYLQEIFSNEMAKVDDSFFHRLEESFLVEEDKKHERHPIFGNIVDEVAYHEKYPTIYHLRKKLVDSTDKADLRLIYLALAHMIKFRGHFLIEGDLNPDNSDVDKLFIQLVQTYNQLFEENPINASGVDAKAILSARLSKSRRLENLIAQLPGEKKNGLFGNLIALSLGLTPNFKSNFDLAEDAKLQLSKDTYDDDLDNLLAQIGDQYADLFLAAKNLSDAILLSDILRVNTEITKAPLSASMIKRYDEHHQDLTLLKALVRQQLPEKYKEIFFDQSKNGYAGYIDGGASQEEFYKFIKPILEKMDGTEELLVKLNREDLLRKQRTFDNGSIPHQIHLGELHAILRRQEDFYPFLKDNREKIEKILTFRIPYYVGPLARGNSRFAWMTRKSEETITPWNFEEVVDKGASAQSFIERMTNFDKNLPNEKVLPKHSLLYEYFTVYNELTKVKYVTEGMRKPAFLSGEQKKAIVDLLFKTNRKVTVKQLKEDYFKKIECFDSVEISGVEDRFNASLGTYHDLLKIIKDKDFLDNEENEDILEDIVLTLTLFEDREMIEERLKTYAHLFDDKVMKQLKRRRYTGWGRLSRKLINGIRDKQSGKTILDFLKSDGFANRNFMQLIHDDSLTFKEDIQKAQVSGQGDSLHEHIANLAGSPAIKKGILQTVKVVDELVKVMGRHKPENIVIEMARENQTTQKGQKNSRERMKRIEEGIKELGSQILKEHPVENTQLQNEKLYLYYLQNGRDMYVDQELDINRLSDYDVDHIVPQSFLKDDSIDNKVLTRSDKNRGKSDNVPSEEVVKKMKNYWRQLLNAKLITQRKFDNLTKAERGGLSELDKAGFIKRQLVETRQITKHVAQILDSRMNTKYDENDKLIREVKVITLKSKLVSDFRKDFQFYKVREINNYHHAHDAYLNAVVGTALIKKYPKLESEFVYGDYKVYDVRKMIAKSEQEIGKATAKYFFYSNIMNFFKTEITLANGEIRKRPLIETNGETGEIVWDKGRDFATVRKVLSMPQVNIVKKTEVQTGGFSKESILPKRNSDKLIARKKDWDPKKYGGFVSPTVAYSVLVVAKVEKGKSKKLKSVKELLGITIMERSSFEKNPIDFLEAKGYKEVKKDLIIKLPKYSLFELENGRKRMLASARELQKGNELALPSKYVNFLYLASHYEKLKGSPEDNEQKQLFVEQHKHYLDEIIEQISEFSKRVILADANLDKVLSAYNKHRDKPIREQAENIIHLFTLTNLGAPAAFKYFDTTIDRKQYRSTKEVLDATLIHQSITGLYETRIDLSQLGGDEGADKRTADGSEFESPKKKRKV

SEQ ID NO: 205 - protein, 1588 aa, Artificial Sequence
  Description of Artificial Sequence: Synthetic polypeptide
MSEVEFSHEYWMRHALTLAKRARDEREVPVGAVLVLNNRVIGEGWNRAIGLHDPTAHAEIMALRQGGLVMQNYRLIDATLYVTFEPCVMCAGAMIHSRIGRVVFGVRNAKTGAAGSLMDVLHYPGMNHRVEITEGILADECAALLCTFFRMPRSVFNAQKKAQSSTDSGGSSGGSSGSETPGTSESATPESSGGSSGGSDKKYSIGLAIGTNSVGWAVITDEYKVPSKKFKVLGNTDRHSIKKNLIGALLFDSGETAEATRLKRTARRRYTRRKNRICYLQEIFSNEMAKVDDSFFHRLEESFLVEEDKKHERHPIFGNIVDEVAYHEKYPTIYHLRKKLVDSTDKADLRLIYLALAHMIKFRGHFLIEGDLNPDNSDVDKLFIQLVQTYNQLFEENPINASGVDAKAILSARLSKSRRLENLIAQLPGEKKNGLFGNLIALSLGLTPNFKSNFDLAEDAKLQLSKDTYDDDLDNLLAQIGDQYADLFLAAKNLSDAILLSDILRVNTEITKAPLSASMIKRYDEHHQDLTLLKALVRQQLPEKYKEIFFDQSKNGYAGYIDGGASQEEFYKFIKPILEKMDGTEELLVKLNREDLLRKQRTFDNGSIPHQIHLGELHAILRRQEDFYPFLKDNREKIEKILTFRIPYYVGPLARGNSRFAWMTRKSEETITPWNFEEVVDKGASAQSFIERMTNFDKNLPNEKVLPKHSLLYEYFTVYNELTKVKYVTEGMRKPAFLSGEQKKAIVDLLFKTNRKVTVKQLKEDYFKKIECFDSVEISGVEDRFNASLGTYHDLLKIIKDKDFLDNEENEDILEDIVLTLTLFEDREMIEERLKTYAHLFDDKVMKQLKRRRYTGWGRLSRKLINGIRDKQSGKTILDFLKSDGFANRNFMQLIHDDSLTFKEDIQKAQVSGQGDSLHEHIANLAGSPAIKKGILQTVKVVDELVKVMGRHKPENIVIEMARENQTTQKGQKNSRERMKRIEEGIKELGSQILKEHPVENTQLQNEKLYLYYLQNGRDMYVDQELDINRLSDYDVDHIVPQSFLKDDSIDNKVLTRSDKNRGKSDNVPSEEVVKKMKNYWRQLLNAKLITQRKFDNLTKAERGGLSELDKAGFIKRQLVETRQITKHVAQILDSRMNTKYDENDKLIREVKVITLKSKLVSDFRKDFQFYKVREINNYHHAHDAYLNAVVGTALIKKYPKLESEFVYGDYKVYDVRKMIAKSEQEIGKATAKYFFYSNIMNFFKTEITLANGEIRKRPLIETNGETGEIVWDKGRDFATVRKVLSMPQVNIVKKTEVQTGGFSKESILPKRNSDKLIARKKDWDPKKYGGFVSPTVAYSVLVVAKVEKGKSKKLKSVKELLGITIMERSSFEKNPIDFLEAKGYKEVKKDLIIKLPKYSLFELENGRKRMLASARELQKGNELALPSKYVNFLYLASHYEKLKGSPEDNEQKQLFVEQHKHYLDEIIEQISEFSKRVILADANLDKVLSAYNKHRDKPIREQAENIIHLFTLTNLGAPAAFKYFDTTIDRKQYRSTKEVLDATLIHQSITGLYETRIDLSQLGGDEGADKRTADGSEFESPKKKRKV

SEQ ID NO: 206 - protein, 1588 aa, Artificial Sequence
  Description of Artificial Sequence: Synthetic polypeptide
MSEVEFSHEYWMRHALTLAKRARDEREVPVGAVLVLNNRVIGEGWNRAIGLHDPTAHAEIMALRQGGLVMQNYRLYDATLYVTFEPCVMCAGAMIHSRIGRVVFGVRNAKTGAAGSLMDVLHHPGMNHRVEITEGILADECAALLCRFFRMPRRVFNAQKKAQSSTDSGGSSGGSSGSETPGTSESATPESSGGSSGGSDKKYSIGLAIGTNSVGWAVITDEYKVPSKKFKVLGNTDRHSIKKNLIGALLFDSGETAEATRLKRTARRRYTRRKNRICYLQEIFSNEMAKVDDSFFHRLEESFLVEEDKKHERHPIFGNIVDEVAYHEKYPTIYHLRKKLVDSTDKADLRLIYLALAHMIKFRGHFLIEGDLNPDNSDVDKLFIQLVQTYNQLFEENPINASGVDAKAILSARLSKSRRLENLIAQLPGEKKNGLFGNLIALSLGLTPNFKSNFDLAEDAKLQLSKDTYDDDLDNLLAQIGDQYADLFLAAKNLSDAILLSDILRVNTEITKAPLSASMIKRYDEHHQDLTLLKALVRQQLPEKYKEIFFDQSKNGYAGYIDGGASQEEFYKFIKPILEKMDGTEELLVKLNREDLLRKQRTFDNGSIPHQIHLGELHAILRRQEDFYPFLKDNREKIEKILTFRIPYYVGPLARGNSRFAWMTRKSEETITPWNFEEVVDKGASAQSFIERMTNFDKNLPNEKVLPKHSLLYEYFTVYNELTKVKYVTEGMRKPAFLSGEQKKAIVDLLFKTNRKVTVKQLKEDYFKKIECFDSVEISGVEDRFNASLGTYHDLLKIIKDKDFLDNEENEDILEDIVLTLTLFEDREMIEERLKTYAHLFDDKVMKQLKRRRYTGWGRLSRKLINGIRDKQSGKTILDFLKSDGFANRNFMQLIHDDSLTFKEDIQKAQVSGQGDSLHEHIANLAGSPAIKKGILQTVKVVDELVKVMGRHKPENIVIEMARENQTTQKGQKNSRERMKRIEEGIKELGSQILKEHPVENTQLQNEKLYLYYLQNGRDMYVDQELDINRLSDYDVDHIVPQSFLKDDSIDNKVLTRSDKNRGKSDNVPSEEVVKKMKNYWRQLLNAKLITQRKFDNLTKAERGGLSELDKAGFIKRQLVETRQITKHVAQILDSRMNTKYDENDKLIREVKVITLKSKLVSDFRKDFQFYKVREINNYHHAHDAYLNAVVGTALIKKYPKLESEFVYGDYKVYDVRKMIAKSEQEIGKATAKYFFYSNIMNFFKTEITLANGEIRKRPLIETNGETGEIVWDKGRDFATVRKVLSMPQVNIVKKTEVQTGGFSKESILPKRNSDKLIARKKDWDPKKYGGFVSPTVAYSVLVVAKVEKGKSKKLKSVKELLGITIMERSSFEKNPIDFLEAKGYKEVKKDLIIKLPKYSLFELENGRKRMLASARELQKGNELALPSKYVNFLYLASHYEKLKGSPEDNEQKQLFVEQHKHYLDEIIEQISEFSKRVILADANLDKVLSAYNKHRDKPIREQAENIIHLFTLTNLGAPAAFKYFDTTIDRKQYRSTKEVLDATLIHQSITGLYETRIDLSQLGGDEGADKRTADGSEFESPKKKRKV

SEQ ID NO: 207 - protein, 1588 aa, Artificial Sequence
  Description of Artificial Sequence: Synthetic polypeptide
MSEVEFSHEYWMRHALTLAKRARDEREVPVGAVLVLNNRVIGEGWNRAIGLHDPTAHAEIMALRQGGLVMQNYRLIDATLYSTFEPCVMCAGAMIHSRIGRVVFGVRNAKTGAAGSLMDVLHYPGMNHRVEITEGILADECAALLCYFFRMPRRVFNAQKKAQSSTDSGGSSGGSSGSETPGTSESATPESSGGSSGGSDKKYSIGLAIGTNSVGWAVITDEYKVPSKKFKVLGNTDRHSIKKNLIGALLFDSGETAEATRLKRTARRRYTRRKNRICYLQEIFSNEMAKVDDSFFHRLEESFLVEEDKKHERHPIFGNIVDEVAYHEKYPTIYHLRKKLVDSTDKADLRLIYLALAHMIKFRGHFLIEGDLNPDNSDVDKLFIQLVQTYNQLFEENPINASGVDAKAILSARLSKSRRLENLIAQLPGEKKNGLFGNLIALSLGLTPNFKSNFDLAEDAKLQLSKDTYDDDLDNLLAQIGDQYADLFLAAKNLSDAILLSDILRVNTEITKAPLSASMIKRYDEHHQDLTLLKALVRQQLPEKYKEIFFDQSKNGYAGYIDGGASQEEFYKFIKPILEKMDGTEELLVKLNREDLLRKQRTFDNGSIPHQIHLGELHAILRRQEDFYPFLKDNREKIEKILTFRIPYYVGPLARGNSRFAWMTRKSEETITPWNFEEVVDKGASAQSFIERMTNFDKNLPNEKVLPKHSLLYEYFTVYNELTKVKYVTEGMRKPAFLSGEQKKAIVDLLFKTNRKVTVKQLKEDYFKKIECFDSVEISGVEDRFNASLGTYHDLLKIIKDKDFLDNEENEDILEDIVLTLTLFEDREMIEERLKTYAHLFDDKVMKQLKRRRYTGWGRLSRKLINGIRDKQSGKTILDFLKSDGFANRNFMQLIHDDSLTFKEDIQKAQVSGQGDSLHEHIANLAGSPAIKKGILQTVKVVDELVKVMGRHKPENIVIEMARENQTTQKGQKNSRERMKRIEEGIKELGSQILKEHPVENTQLQNEKLYLYYLQNGRDMYVDQELDINRLSDYDVDHIVPQSFLKDDSIDNKVLTRSDKNRGKSDNVPSEEVVKKMKNYWRQLLNAKLITQRKFDNLTKAERGGLSELDKAGFIKRQLVETRQITKHVAQILDSRMNTKYDENDKLIREVKVITLKSKLVSDFRKDFQFYKVREINNYHHAHDAYLNAVVGTALIKKYPKLESEFVYGDYKVYDVRKMIAKSEQEIGKATAKYFFYSNIMNFFKTEITLANGEIRKRPLIETNGETGEIVWDKGRDFATVRKVLSMPQVNIVKKTEVQTGGFSKESILPKRNSDKLIARKKDWDPKKYGGFVSPTVAYSVLVVAKVEKGKSKKLKSVKELLGITIMERSSFEKNPIDFLEAKGYKEVKKDLIIKLPKYSLFELENGRKRMLASARELQKGNELALPSKYVNFLYLASHYEKLKGSPEDNEQKQLFVEQHKHYLDEIIEQISEFSKRVILADANLDKVLSAYNKHRDKPIREQAENIIHLFTLTNLGAPAAFKYFDTTIDRKQYRSTKEVLDATLIHQSITGLYETRIDLSQLGGDEGADKRTADGSEFESPKKKRKV

SEQ ID NO: 208 - protein, 21 aa, Artificial Sequence
  Description of Artificial Sequence: Synthetic peptide
  MISC_FEATURE (1)..(21): This sequence may encompass 1, 3, or 7 "Gly Gly Ser" repeating units
GGSGGSGGSGGSGGSGGSGGS

SEQ ID NO: 209 - DNA, 117 bp, Artificial Sequence
  Description of Artificial Sequence: Synthetic oligonucleotide
  Description of Combined DNA/RNA Molecule: Synthetic oligonucleotide
  modified_base (98)..(117): a, c, t, g, unknown or other
guucugtcuuuuggucaggacaaccgucuagcuauaagugcugcagggugugagaaacuccuauugcuggacgaugucucuuacgaggcauuagcacnnnnnnnnnnnnnnnnnnnn

SEQ ID NO: 210 - RNA, 108 nt, Artificial Sequence
  Description of Artificial Sequence: Synthetic polynucleotide
  modified_base (89)..(108): a, c, u, g, unknown or other
gaccuauagggucaaugaaucugugcgugugccauaaguaauuaaaaauuacccaccacaggagcaccugaaaacaggugcuuggcacnnnnnnnnnnnnnnnnnnnn

SEQ ID NO: 211 - RNA, 119 nt, Artificial Sequence
  Description of Artificial Sequence: Synthetic polynucleotide
  modified_base (100)..(119): a, c, u, g, unknown or other
gucuaaaggacagaauuuuucaacgggugugccaauggccacuuuccagguggcaaagcccguugaacuucucaaaaagaacgaucugagaaguggcacnnnnnnnnnnnnnnnnnnnn

SEQ ID NO: 212 - protein, 1368 aa, Artificial Sequence [sequence omitted]

SEQ ID NO: 213 - DNA, 20 bp, Unknown
  Description of Unknown: target sequence
ccatgtccagccttcaggca

SEQ ID NO: 214 - DNA, 20 bp, Unknown
  Description of Unknown: target sequence
tccatgtccagccttcaggc

SEQ ID NO: 215 - DNA, 20 bp, Unknown
  Description of Unknown: target sequence
ttccatgtccagccttcagg

SEQ ID NO: 216 - DNA, 20 bp, Unknown
  Description of Unknown: target sequence
gcttccatgtccagccttca

SEQ ID NO: 217 - DNA, 21 bp, Unknown
  Description of Unknown: target sequence
cttccatgtccagccttcagg

SEQ ID NO: 218 - DNA, 23 bp, Unknown
  Description of Unknown: target sequence
agcttccatgtccagccttcagg

SEQ ID NO: 219 - DNA, 20 bp, Unknown
  Description of Unknown: target sequence
agcttccatgtccagccttc

SEQ ID NO: 220 - DNA, 20 bp, Unknown
  Description of Unknown: target sequence
cttaagcttccatgtccagc

SEQ ID NO: 221 - DNA, 20 bp, Unknown
  Description of Unknown: target sequence
agcaaaaggcttttccctgg

SEQ ID NO: 222 - DNA, 20 bp, Unknown
  Description of Unknown: target sequence
gagcaaaaggcttttccctg

SEQ ID NO: 223 - DNA, 20 bp, Unknown
  Description of Unknown: target sequence
agagcaaaaggcttttccct

SEQ ID NO: 224 - DNA, 20 bp, Unknown
  Description of Unknown: target sequence
tagagcaaaaggcttttccc

SEQ ID NO: 225 - DNA, 21 bp, Unknown
  Description of Unknown: target sequence
tagagcaaaaggcttttccct

SEQ ID NO: 226 - DNA, 23 bp, Unknown
  Description of Unknown: target sequence
tttagagcaaaaggcttttccct

SEQ ID NO: 227 - DNA, 20 bp, Unknown
  Description of Unknown: target sequence
ccatgaagtcaaaatcatta

SEQ ID NO: 228 - DNA, 20 bp, Unknown
  Description of Unknown: target sequence
accatgaagtcaaaatcatt

SEQ ID NO: 229 - DNA, 20 bp, Unknown
  Description of Unknown: target sequence
taccatgaagtcaaaatcat

SEQ ID NO: 230 - DNA, 21 bp, Unknown
  Description of Unknown: target sequence
ttaccatgaagtcaaaatcat

SEQ ID NO: 231 - DNA, 23 bp, Unknown
  Description of Unknown: target sequence
agttaccatgaagtcaaaatcat

SEQ ID NO: 232 - DNA, 20 bp, Unknown
  Description of Unknown: target sequence
cttttcacttcctgccgggg

SEQ ID NO: 233 - DNA, 20 bp, Unknown
  Description of Unknown: target sequence
tcagccccgtttcttgggaa

SEQ ID NO: 234 - DNA, 20 bp, Unknown
  Description of Unknown: target sequence
gctttcagccccgtttcttg

SEQ ID NO: 235 - DNA, 21 bp, Unknown
  Description of Unknown: target sequence
cggctttcagccccgtttctt

SEQ ID NO: 236 - DNA, 23 bp, Unknown
  Description of Unknown: target sequence
cccggctttcagccccgtttctt

SEQ ID NO: 237 - DNA, 20 bp, Unknown
  Description of Unknown: target sequence
gcacttcttgatggggagta

SEQ ID NO: 238 - DNA, 20 bp, Unknown
  Description of Unknown: target sequence
tcttgcacttcttgatgggg

SEQ ID NO: 239 - DNA, 21 bp, Unknown
  Description of Unknown: target sequence
cttgcacttcttgatggggag

SEQ ID NO: 240 - DNA, 23 bp, Unknown
  Description of Unknown: target sequence
gtcttgcacttcttgatggggag

SEQ ID NO: 241 - DNA, 23 bp, Unknown
  Description of Unknown: target sequence
ccatgtccagccttcaggcaggg

SEQ ID NO: 242 - DNA, 23 bp, Unknown
  Description of Unknown: target sequence
tccatgtccagccttcaggcagg

SEQ ID NO: 243 - DNA, 23 bp, Unknown
  Description of Unknown: target sequence
ttccatgtccagccttcaggcag

SEQ ID NO: 244 - DNA, 23 bp, Unknown
  Description of Unknown: target sequence
gcttccatgtccagccttcaggc

SEQ ID NO: 245 - RNA, 21 nt, Artificial Sequence
  Description of Artificial Sequence: Synthetic oligonucleotide
  5' "G" in the gRNA sequence is added to the sequence in view of a mismatch in the gRNA, as the particular polymerase requires a "g" to initiate transcription
gccauguccagccuucaggca

SEQ ID NO: 246 - RNA, 21 nt, Artificial Sequence
  Description of Artificial Sequence: Synthetic oligonucleotide
  5' "G" in the gRNA sequence is added to the sequence in view of a mismatch in the gRNA, as the particular polymerase requires a "g" to initiate transcription
guccauguccagccuucaggc

SEQ ID NO: 247 - RNA, 21 nt, Artificial Sequence
  Description of Artificial Sequence: Synthetic oligonucleotide
  5' "G" in the gRNA sequence is added to the sequence in view of a mismatch in the gRNA, as the particular polymerase requires a "g" to initiate transcription
guuccauguccagccuucagg

SEQ ID NO: 248 - RNA, 20 nt, Artificial Sequence
  Description of Artificial Sequence: Synthetic oligonucleotide
gcuuccauguccagccuuca

SEQ ID NO: 249 - RNA, 21 nt, Artificial Sequence
  Description of Artificial Sequence: Synthetic oligonucleotide
  5' "G" in the gRNA sequence is added to the sequence in view of a mismatch in the gRNA, as the particular polymerase requires a "g" to initiate transcription
gagcuuccauguccagccuuc

SEQ ID NO: 250 - RNA, 21 nt, Artificial Sequence
  Description of Artificial Sequence: Synthetic oligonucleotide
  5' "G" in the gRNA sequence is added to the sequence in view of a mismatch in the gRNA, as the particular polymerase requires a "g" to initiate transcription
gagagcaaaaggcuuuucccu

SEQ ID NO: 251 - RNA, 21 nt, Artificial Sequence
  Description of Artificial Sequence: Synthetic oligonucleotide
  5' "G" in the gRNA sequence is added to the sequence in view of a mismatch in the gRNA, as the particular polymerase requires a "g" to initiate transcription
guagagcaaaaggcuuuuccc

SEQ ID NO: 252 - RNA, 22 nt, Artificial Sequence
  Description of Artificial Sequence: Synthetic oligonucleotide
  5' "G" in the gRNA sequence is added to the sequence in view of a mismatch in the gRNA, as the particular polymerase requires a "g" to initiate transcription
guagagcaaaaggcuuuucccu

SEQ ID NO: 253 - RNA, 24 nt, Artificial Sequence
  Description of Artificial Sequence: Synthetic oligonucleotide
  5' "G" in the gRNA sequence is added to the sequence in view of a mismatch in the gRNA, as the particular polymerase requires a "g" to initiate transcription
guuuagagcaaaaggcuuuucccu

SEQ ID NO: 254 - RNA, 21 nt, Artificial Sequence
  Description of Artificial Sequence: Synthetic oligonucleotide
  5' "G" in the gRNA sequence is added to the sequence in view of a mismatch in the gRNA, as the particular polymerase requires a "g" to initiate transcription
gucuugcacuucuugaugggg

SEQ ID NO: 255 - RNA, 22 nt, Artificial Sequence
  Description of Artificial Sequence: Synthetic oligonucleotide
  5' "G" in the gRNA sequence is added to the sequence in view of a mismatch in the gRNA, as the particular polymerase requires a "g" to initiate transcription
gcuugcacuucuugauggggag

SEQ ID NO: 256 - RNA, 24 nt, Artificial Sequence
  Description of Artificial Sequence: Synthetic oligonucleotide
  5' "G" in the gRNA sequence is added to the sequence in view of a mismatch in the gRNA, as the particular polymerase requires a "g" to initiate transcription
ggucuugcacuucuugauggggag

1. A method of editing a methyl CpG binding protein 2 (MECP2) gene or regulatory element thereof in a subject, the method comprising administering to a subject in need thereof (i) an adenosine base editor or a nucleic acid sequence encoding the adenosine base editor and (ii) a guide polynucleotide or a nucleic acid sequence encoding the guide polynucleotide, wherein the adenosine base editor comprises a programmable DNA binding domain and an adenosine deaminase domain, wherein the adenosine deaminase domain comprises an amino acid substitution at amino acid position 82 or 166 relative to a TadA reference sequence, or a corresponding position thereof, and wherein the guide polynucleotide directs the adenosine base editor to effect an A-to-G nucleobase alteration in the MECP2 gene or a regulatory element thereof, which comprises a SNP associated with Rett syndrome (RETT); wherein the A-to-G nucleobase alteration is at the SNP associated with RETT, which results in an R133C or an R306C amino acid mutation in a MECP2 polypeptide, or a variant thereof, encoded by the MECP2 gene.

2. (canceled)

3. The method of claim 1, wherein the A-to-G nucleobase alteration changes the SNP associated with RETT to a wild type nucleobase.

4-7. (canceled)

8. The method of claim 1, wherein the adenosine base editor is in complex with a single guide RNA (sgRNA) comprising a nucleic acid sequence complementary to the MECP2 gene or regulatory element thereof comprising the SNP associated with RETT.

9. The method of claim 8, wherein the guide polynucleotide comprises a nucleic acid sequence selected from 5′-AGAGCAAAAGGCUUUUCCCU-3′, 5′-UAGAGCAAAAGGCUUUUCCC-3′, 5′-UAGAGCAAAAGGCUUUUCCCU-3′, 5′-UUUAGAGCAAAAGGCUUUUCCCU-3′, 5′-UCUUGCACUUCUUGAUGGGG-3′, 5′-CUUGCACUUCUUGAUGGGGAG-3′, or 5′-GUCUUGCACUUCUUGAUGGGGAG-3′.

10. A base editor system comprising (i) an adenosine base editor or a nucleic acid sequence encoding the adenosine base editor and (ii) a guide polynucleotide or a nucleic acid sequence encoding the guide polynucleotide, wherein the adenosine base editor comprises a programmable DNA binding domain and an adenosine deaminase domain, wherein the adenosine deaminase domain comprises an amino acid substitution at amino acid position 82 or 166 relative to a TadA reference sequence or a corresponding position thereof, and wherein the guide polynucleotide directs the adenosine base editor to effect an A-to-G nucleobase alteration in a methyl CpG binding protein 2 (MECP2) gene or regulatory element thereof, which comprises a SNP associated with Rett syndrome (RETT); wherein the A-to-G nucleobase alteration is at the SNP associated with RETT, which results in an R133C or an R306C amino acid mutation in a MECP2 polypeptide, or a variant thereof, encoded by the MECP2 gene.

11-16. (canceled)

17. A method of editing an MECP2 polynucleotide comprising a single nucleotide polymorphism (SNP) associated with Rett Syndrome (RETT), the method comprising contacting the MECP2 polynucleotide with an Adenosine Deaminase Base Editor 8 (ABE8) in a complex with one or more guide polynucleotides, wherein the ABE8 comprises a polynucleotide programmable DNA binding domain and an adenosine deaminase domain, and wherein one or more of said guide polynucleotides target said base editor to effect an A⋅T to G⋅C alteration of the SNP in the MECP2 polynucleotide associated with RETT, wherein the alteration is one or both of R133C or R306C.

18-31. (canceled)

32. The method of claim 17, wherein the adenosine deaminase domain comprises an alteration at amino acid position 82 and/or 166 of
MSEVEFSHEYWMRHALTLAKRARDEREVPVGAVLVLNNRVIGEGWNRAIG
LHDPTAHAEIMALRQGGLVMQNYRLIDATLYVTFEPCVMCAGAMIHSRIG
RVVFGVRNAKTGAAGSLMDVLHYPGMNHRVEITEGILADECAALLCYFFR
MPRQVFNAQKKAQSSTD.

33-50. (canceled)

51. A cell produced by introducing into the cell, or a progenitor thereof:
an ABE8 base editor, or a polynucleotide encoding said base editor, wherein said ABE8 base editor comprises a polynucleotide programmable DNA binding domain and an adenosine deaminase domain; and
one or more guide polynucleotides that target the base editor to effect an A⋅T to GC alteration of the SNP in an MECP2 polynucleotide associated with RETT syndrome (RETT), wherein the alteration is one or both of R133C or R306C.

52-87. (canceled)

88. A method of treating RETT Syndrome (RETT) in a subject, comprising administering to said subject:
an ABE8 base editor, or a polynucleotide encoding said base editor, wherein said ABE8 base editor comprises a polynucleotide programmable DNA binding domain and an adenosine deaminase domain; and
one or more guide polynucleotides that target the ABE8 base editor to effect an A⋅T to G⋅C alteration of the SNP in an MECP2 polynucleotide associated with RETT, wherein the alteration is one or both of R133C and/or R306C.

89-120. (canceled)

121. A method of treating Rett syndrome (RETT) in a subject, the method comprising: administering to a subject in need thereof (i) an adenosine base editor or a nucleic acid sequence encoding the adenosine base editor and (ii) a guide polynucleotide or a nucleic acid sequence encoding the guide polynucleotide, wherein the adenosine base editor comprises a programmable DNA binding domain and an adenosine deaminase domain, wherein the adenosine deaminase domain comprises an amino acid substitution at amino acid position 82 or 166 relative to a TadA reference sequence, or a corresponding position thereof,
wherein the guide polynucleotide directs the adenosine base editor to effect an A-to-G nucleobase alteration in a methyl CpG binding protein 2 (MECP2) gene or a regulatory element thereof comprising a SNP associated with RETT in the subject, thereby treating RETT in the subject, and wherein the SNP associated with RETT results in an R133C or an R306C amino acid mutation in a MECP2 polypeptide, or a variant thereof, encoded by the MECP2 gene.

122-123. (canceled)

124. The method of 121, wherein the A-to-G nucleobase alteration changes the SNP associated with RETT to a wild type or non-wild-type nucleobase.

125-133. (canceled)

134. The method of claim 133, wherein the SNP associated with RETT results in an R133C amino acid mutation in a MECP2 polypeptide, or a variant thereof, encoded by the MECP2 gene.

135. The method of claim 133, wherein the SNP associated with RETT results in an R306C amino acid mutation in a MECP2 polypeptide, or a variant thereof, encoded by the MECP2 gene.

136-142. (canceled)

143. A guide polynucleotide or guide RNA comprising 15, 16, 17, 18, 19, 20, 21, 22, 23, 24, 25, 26, 27, 28, 29, or 30 contiguous nucleotides that are perfectly complementary to an MECP2 gene that encodes an MECP2 protein.

144. A guide polynucleotide or guide RNA of claim 143 comprising a nucleic acid sequence selected from 5′-AGAGCAAAAGGCUUUUCCCU-3′, 5′-UAGAGCAAAAGGCUUUUCCC-3′, 5′-UAGAGCAAAAGGCUUUUCCCU-3′, 5′-UUUAGAGCAAAAGGCUUUUCCCU-3′, 5′-UCUUGCACUUCUUGAUGGGG-3′, 5′-CUUGCACUUCUUGAUGGGGAG-3′, or 5′-GUCUUGCACUUCUUGAUGGGGAG-3′.

145. (canceled)

146. A composition comprising an Adenosine Deaminase Base Editor 8 (ABE8) and a guide RNA, wherein the ABE8 comprises a polynucleotide programmable DNA binding domain and an adenosine deaminase domain, and wherein the guide RNA targets the base editor to effect an A⋅T to G⋅C alteration of the SNP in an MECP2 polynucleotide associated with RETT syndrome, and wherein the alteration is one or both of R133C or R306C.

147-179. (canceled)

180. A method of treating RETT syndrome, the method comprising administering to a subject in need thereof the pharmaceutical composition of claim 172.

181. Use of the pharmaceutical composition of claim 172 in the treatment of RETT syndrome in a subject.

182. (canceled)

183. A composition comprising the cell of claim 51.

184. (canceled)

185. A pharmaceutical composition comprising (i) a nucleic acid encoding an ABE8 base editor; and (ii) the guide polynucleotide or guide RNA of claim 143.

186. The pharmaceutical composition of claim 185, further comprising a lipid.

187. The pharmaceutical composition of claim 186, wherein the lipid is a cationic lipid.

188. (canceled)
